(19) United States
(12) Patent Application Publication
(10) Pub. No.: US 2022/0106378 A1
(43) Pub. Date: Apr. 7, 2022

(54) T-CELL MODULATORY ANTIGEN-PRESENTING POLYPEPTIDES AND METHODS OF USE THEREOF

(71) Applicant: Cue Biopharma, Inc., Cambridge, MA (US)

(72) Inventors: Ronald D. Seidel, III, Cambridge, MA (US); Rodolfo J. Chaparro, Cambidge, MA (US)

(21) Appl. No.: 17/394,960

(22) Filed: Aug. 5, 2021

Related U.S. Application Data
(63) Continuation of application No. PCT/US2020/019244, filed on Feb. 21, 2020.
(60) Provisional application No. 62/814,715, filed on Mar. 6, 2019.

(51) Int. Cl. C07K 14/74; C07K 14/705; C07K 14/47

(52) U.S. Cl. CPC C07K 14/70539; C07K 14/70532; A61K 38/00; C07K 2317/34; C07K 2319/30; C07K 14/4713

(57) ABSTRACT

The present disclosure provides T-cell modulatory antigen-presenting polypeptides, including single-chain antigen-presenting polypeptides and multimeric antigen-presenting polypeptides. The present disclosure provides nucleic acids comprising nucleotide sequences encoding T-cell modulatory antigen-presenting polypeptides of the present disclosure, as well as cells genetically modified with the nucleic acids. A T-cell modulatory antigen-presenting polypeptide of the present disclosure is useful for modulating activity of a T cell. Thus, the present disclosure provides compositions and methods for modulating the activity of T cells, as well as compositions and methods for treating persons who have autoimmune disorders.

### CROSS-REFERENCE

[0001] This application claims the benefit of U.S. Provisional Patent Application No. 62/814,715, filed Mar. 6, 2019, which application is incorporated herein by reference in its entirety.

### INCORPORATION BY REFERENCE OF SEQUENCE LISTING PROVIDED AS A TEXT FILE

[0002] A Sequence Listing is provided herewith as a text file, “CUEB-118WO_SeqList_RevDec2021_ST25” created on Dec. 14, 2021 and having a size of 726 KB. The contents of the text file are incorporated by reference herein in their entirety.

### INTRODUCTION

[0003] Central to the proper functioning of the mammalian immune system are the coordinated activities and communications between two specialized cell types, antigen-presenting cells (“APCs”) and T cells. APCs serve to capture and break the proteins from foreign organisms, or abnormal proteins (e.g., from genetic mutation in cancer cells), into smaller fragments suitable as signals for scrutiny by the larger immune system, including T cells. In particular, APCs break down proteins into small peptide fragments, which are then paired with proteins of the major histocompatibility complex (“MHC”) and displayed on the cell surface. Cell surface display of an MHC together with a peptide fragment, also known as a T cell epitope, provides the underlying scaffold surveilled by T cells, allowing for specific recognition. The peptide fragments can be pathogen-derived, tumor-derived, or derived from natural host proteins (self-proteins). Moreover, APCs can recognize other foreign components, such as bacterial toxins, viral proteins, viral DNA, viral RNA, etc., whose presence denotes an escalated threat level. The APCs relay this information to T cells through additional costimulatory signals in order to generate a more effective response.

[0004] T cells recognize peptide-major histocompatibility complex (“pMHC”) complexes through a specialized cell surface receptor, the T cell receptor (“TCR”). The TCR is unique to each T cell; as a consequence, each T cell is highly specific for a particular pMHC target. In order to adequately address the universe of potential threats, a very large number (˜10,000,000) of distinct T cells with distinct TCRs exist in the human body. Further, any given T cell, specific for a particular T cell peptide, is initially a very small fraction of the total T cell population. Although normally dormant and in limited numbers, T cells bearing specific TCRs can be readily activated and amplified by APCs to generate highly potent T cell responses that involve many millions of T cells. Such activated T cell responses are capable of attacking and clearing viral infections, bacterial infections, and other cellular threats including tumors, as illustrated below. Conversely, the broad, non-specific activation of overly active T cell responses against self or shared antigens can give rise to T cells inappropriately attacking and destroying healthy tissues or cells.

[0005] MHC proteins are referred to as human leukocyte antigens (HLA) in humans. HLA class II gene loci include HLA-DM (HLA-DMA and HLA-DMB that encode HLA-DM α chain and HLA-DM β chain, respectively), HLA-DO (HLA-DOA and HLA-DOB that encode HLA-DO α chain and HLA-DO β chain, respectively), HLA-DP (HLA-DPA and HLA-DPB that encode HLA-DP α chain and HLA-DP β chain, respectively), HLA-DQ (HLA-DQA and HLA-DQB that encode HLA-DQ α chain and HLA-DQ β chain, respectively), and HLA-DR (HLA-DRA and HLA-DRB that encode HLA-DR α chain and HLA-DR β chain, respectively).

### SUMMARY

[0006] The present disclosure provides T-cell modulatory antigen-presenting polypeptides, including single-chain antigen-presenting polypeptides and multimeric antigen-presenting polypeptides. The present disclosure provides nucleic acids comprising nucleotide sequences encoding T-cell modulatory antigen-presenting polypeptides of the present disclosure, as well as cells genetically modified with the nucleic acids. A T-cell modulatory antigen-presenting polypeptide of the present disclosure is useful for modulating activity of a T cell. Thus, the present disclosure provides compositions and methods for modulating the activity of T cells, as well as compositions and methods for treating persons who have autoimmune disorders.

### BRIEF DESCRIPTION OF THE DRAWINGS

[0007] FIG. 1A-4C provide schematic depictions of examples of T-cell modulatory antigen-presenting polypeptides of the present disclosure.

[0008] FIG. 5A-5B provide an amino acid sequences of an immunoglobulin heavy chain CH1 domain (FIG. 5A; SEQ ID NO: 327) and a human kappa light chain constant region (FIG. 5B; SEQ ID NO: 328).

[0009] FIG. 6 provides amino acid sequence of an HLA Class II DRA α chain (SEQ ID NO: 329).

[0010] FIG. 7 provides amino acid sequences of HLA Class II DRB1 β chains (from top to bottom: SEQ ID NOs: 330-342).

[0011] FIG. 8 provides amino acid sequences of HLA Class II DRB3 β chains (from top to bottom: SEQ ID NOs: 343-346).

[0012] FIG. 9 provides an amino acid sequence of an HLA Class II DRB4 β chain (SEQ ID NO: 347).

[0013] FIG. 10 provides an amino acid sequence of an HLA Class II DRB5 β chain (SEQ ID NO: 348).

[0014] FIG. 11 provides an amino acid sequence of an HLA Class II DMA α chain (SEQ ID NO: 349).

[0015] FIG. 12 provides an amino acid sequence of an HLA Class II DMB β chain (SEQ ID NO: 350).

[0016] FIG. 13 provides an amino acid sequence of an HLA Class II DOA α chain (SEQ ID NO: 351).

[0017] FIG. 14 provides an amino acid sequence of an HLA Class II DOB β chain (SEQ ID NO: 352).

[0018] FIG. 15 provides amino acid sequences of HLA Class II DPA1 α chains (from top to bottom: SEQ ID NOs: 353-354).

[0019] FIG. 16 provides amino acid sequences of HLA Class II DPB1 β chains (from top to bottom: SEQ ID NOs: 355-363).

[0020] FIG. 17 provides amino acid sequences of HLA Class II DQA1 α chains (from top to bottom: SEQ ID NOs: 364-371).

[0021] FIG. 18 provides an amino acid sequence of an HLA Class II DQA2 α chain (SEQ ID NO: 372).

[0022] FIG. 19A-19C provide amino acid sequences of HLA Class II DQB1 β chains (from top to bottom: SEQ ID NOs: 373-375).

[0023] FIG. 20A-20B provide amino acid sequence of HLA Class II DQB2 β chains (from top to bottom: SEQ ID NOs: 376-377).

[0024] FIG. 21A-21G provide amino acid sequences of immunoglobulin Fc polypeptides (from top to bottom (from top to bottom: SEQ ID NOs: 378-389).

[0025] FIG. 22A-22L provide schematic depictions of exemplary multimeric T-cell modulatory antigen-presenting polypeptides (TMAPPs) of the present disclosure.

[0026] FIG. 23A-23I provide schematic depictions of exemplary single-chain TMAPPs of the present disclosure.

[0027] FIG. 24 depicts production of exemplary APPs of the present disclosure.

[0028] FIG. 25A-25B provide the amino acid sequence (FIG. 25A; SEQ ID NO: 390) of an exemplary polypeptide chain of a multimeric TMAPP, and a nucleotide sequence (FIG. 25B; SEQ ID 391) encoding same.

[0029] FIG. 26A-26B provide the amino acid sequence (FIG. 26A; SEQ ID NO: 392) of an exemplary polypeptide chain of a multimeric TMAPP, and a nucleotide sequence (FIG. 26B; SEQ ID NO: 393) encoding same.

[0030] FIG. 27A-27B provide the amino acid sequence (FIG. 27A; SEQ ID NO: 394) of an exemplary single-chain APP, and a nucleotide sequence (FIG. 27B; SEQ ID NO:395) encoding same.

[0031] FIG. 28A-28B provide the amino acid sequence (FIG. 28A; SEQ ID NO: 396) of an exemplary single-chain TMAPP, and a nucleotide sequence (FIG. 28B; SEQ ID NO: 397) encoding same.

[0032] FIG. 29A-29B provide the amino acid sequence (FIG. 29A; SEQ ID NO: 398) of an exemplary single-chain TMAPP, and a nucleotide sequence (FIG. 29B; SEQ ID NO: 399) encoding same.

[0033] FIG. 30A-30B provide the amino acid sequence (FIG. 30A; SEQ ID NO: 400) of an exemplary polypeptide chain of a multimeric TMAPP, and a nucleotide sequence (FIG. 30B; SEQ ID NO: 401) encoding same.

[0034] FIG. 31A-31B provide the amino acid sequence (FIG. 31A; SEQ ID NO: 402) of an exemplary polypeptide chain of a multimeric TMAPP, and a nucleotide sequence (FIG. 31B; SEQ ID NO: 403) encoding same.

[0035] FIG. 32A-32B provide the amino acid sequence (FIG. 32A; SEQ ID NO: 404) of an exemplary polypeptide chain of a multimeric TMAPP, and a nucleotide sequence (FIG. 32B; SEQ ID NO: 405) encoding same.

[0036] FIG. 33A-33B provide the amino acid sequence (FIG. 33A; SEQ ID NO: 406) of an exemplary polypeptide chain of a multimeric TMAPP, and a nucleotide sequence (FIG. 33B; SEQ ID NO: 407) encoding same.

[0037] FIG. 34A-34B provide the amino acid sequence (FIG. 34A; SEQ ID NO: 408) of an exemplary polypeptide chain of a multimeric TMAPP, and a nucleotide sequence (FIG. 34B; SEQ ID NO: 409) encoding same.

[0038] FIG. 35A-35B provide the amino acid sequence (FIG. 35A; SEQ ID NO: 410) of an exemplary polypeptide chain of a multimeric TMAPP, and a nucleotide sequence (FIG. 35B; SEQ ID NO: 411) encoding same.

[0039] FIG. 36 provides a schematic depiction of an exemplary TMAPP of the present disclosure, and provides gel analysis of expression.

[0040] FIGS. 37A and 37B provide the amino acid sequence (FIG. 37A; SEQ ID NO: 412) of an exemplary polypeptide chain of a multimeric TMAPP, and a nucleotide sequence (FIG. 37B; SEQ ID NO: 413) encoding same.

[0041] FIGS. 38A and 38B provide the amino acid sequence (FIG. 38A; SEQ ID NO: 414) of an exemplary polypeptide chain of a multimeric TMAPP, and a nucleotide sequence (FIG. 38B; SEQ ID NO: 415) encoding same.

[0042] FIG. 39 depicts production of an exemplary APP of the present disclosure.

[0043] FIG. 40A-40N provide amino acid sequences of exemplary TMPPs of the present disclosure (from top to bottom: SEQ ID NOs: 420-432, 418).

[0044] FIG. 41A-41B depict the effect of a TMAPP of the present disclosure on proIns-specific CD4⁺ T cells.

[0045] FIG. 42 provides a schematic depiction of MHC Class II alpha- and beta-chains with a peptide.

[0046] FIG. 43A-43C provide schematic depictions of examples of antigen-presenting polypeptides (APPs).

[0047] FIG. 44A-44B provide schematic depictions of APPs without immunomodulatory (MOD) polypeptides (FIG. 44A) and with a MOD polypeptide (FIG. 44B). The unmarked rectangle in FIG. 44 represents a dimerization domain (e.g., a bZIP polypeptide). In FIG. 44, the arrows pointing to the dashed lines indicate possible positions of a MOD polypeptide(s).

[0048] FIG. 45 depicts selective inhibition of antigen-specific CD4⁺ T cell expansion in peripheral blood mononuclear cells (PBMCs) from type 1 diabetes (T1D) donors.

[0049] FIG. 46 depicts the effect of a proinsulin (PI) TMMP on PI-responsive CD4⁺ T cells in transgenic mice.

[0050] FIG. 47 depicts the effect of a proinsulin TMMP on proinsulin-specific IL-2 and IFNγ producing CD4⁺ T cells in blood and spleen.

[0051] FIG. 48 depicts the effect of administration of a proinsulin TMMP on cytokine production by PI-specific CD4⁺ T cells.

[0052] FIG. 49 depicts the effect on the level of cytokine production by PI-specific CD4⁺ T cells following administration of a proinsulin TMMP.

[0053] FIG. 50 depicts the effect of administration of a proinsulin TMMP on the number of PI-responsive CD4⁺ T cells in vivo.

### DEFINITIONS

[0054] The terms “polynucleotide” and “nucleic acid,” used interchangeably herein, refer to a polymeric form of nucleotides of any length, either ribonucleotides or deoxyribonucleotides. Thus, this term includes, but is not limited to, single-, double-, or multi-stranded DNA or RNA, genomic DNA, cDNA, DNA-RNA hybrids, or a polymer comprising purine and pyrimidine bases or other natural, chemically or biochemically modified, non-natural, or derivatized nucleotide bases.

[0055] The terms “peptide,” “polypeptide,” and “protein” are used interchangeably herein, and refer to a polymeric form of amino acids of any length, which can include coded and non-coded amino acids, chemically or biochemically modified or derivatized amino acids, and polypeptides having modified peptide backbones.

[0056] A polynucleotide or polypeptide has a certain percent “sequence identity” to another polynucleotide or polypeptide, meaning that, when aligned, that percentage of bases or amino acids are the same, and in the same relative position, when comparing the two sequences. Sequence identity can be determined in a number of different ways. To determine sequence identity, sequences can be aligned using various convenient methods and computer programs (e.g., BLAST, T-COFFEE, MUSCLE, MAFFT, etc.), available over the world wide web at sites including ncbi.nlm.nili.gov/BLAST, ebi.ac.uk/Tools/msa/tcoffee/, ebi.ac.uk/Tools/msa/muscle/, mafft.cbrc.jp/alignment/software/. See, e.g., Altschul et al. (1990), J. Mol. Bioi. 215:403-10.

[0057] The term “conservative amino acid substitution” refers to the interchangeability in proteins of amino acid residues having similar side chains. For example, a group of amino acids having aliphatic side chains consists of glycine, alanine, valine, leucine, and isoleucine; a group of amino acids having aliphatic-hydroxyl side chains consists of serine and threonine; a group of amino acids having amide containing side chains consisting of asparagine and glutamine; a group of amino acids having aromatic side chains consists of phenylalanine, tyrosine, and tryptophan; a group of amino acids having basic side chains consists of lysine, arginine, and histidine; a group of amino acids having acidic side chains consists of glutamate and aspartate; and a group of amino acids having sulfur containing side chains consists of cysteine and methionine. Exemplary conservative amino acid substitution groups are: valine-leucine-isoleucine, phenylalanine-tyrosine, lysine-arginine, alanine-valine-glycine, and asparagine-glutamine.

[0058] The term “binding,” as used herein (e.g. with reference to binding of a T-cell modulatory antigen-presenting polypeptide to a polypeptide (e.g., a T-cell receptor) on a T cell), refers to a non-covalent interaction between two molecules. Non-covalent binding refers to a direct association between two molecules, due to, for example, electrostatic, hydrophobic, ionic, and/or hydrogen-bond interactions, including interactions such as salt bridges and water bridges. Non-covalent binding interactions are generally characterized by a dissociation constant (K_{D}) of less than 10⁻⁶ M, less than 10⁻⁷ M, less than 10⁻⁸ M, less than 10⁻⁹ M, less than 10⁻¹⁰ M, less than 10⁻¹¹ M, less than 10⁻¹² M, less than 10⁻¹³ M, less than 10⁻¹⁴ M, or less than 10⁻¹¹ M. “Affinity” refers to the strength of non-covalent binding, increased binding affinity being correlated with a lower K_{D}. “Specific binding” generally refers to binding with an affinity of at least about 10⁻⁷ M or greater, e.g., 5×10⁻⁷ M, 10⁻⁸ M, 5×10⁻⁸ M, 10⁻⁹ M, and greater. “Non-specific binding” generally refers to binding (e.g., the binding of a ligand to a moiety other than its designated binding site or receptor) with an affinity of less than about 10⁻⁷ M (e.g., binding with an affinity of 10⁻⁶ M, 10⁻⁵ M, 10⁻⁴ M). However, in some contexts, e.g., binding between a TCR and a peptide/MHC complex, “specific binding” can be in the range of from 1 μM to 100 μM, or from 100 μM to 1 mM. “Covalent binding” or “covalent bond,” as used herein, refers to the formation of one or more covalent chemical binds between two different molecules.

[0059] The term “immunological synapse” or “immune synapse” as used herein generally refers to the natural interface between two interacting immune cells of an adaptive immune response including, e.g., the interface between an antigen-presenting cell (APC) or target cell and an effector cell, e.g., a lymphocyte, an effector T cell, a natural killer cell, and the like. An immunological synapse between an APC and a T cell is generally initiated by the interaction of a T cell antigen receptor and major histocompatibility complex molecules, e.g., as described in Bromley et al., Annu Rev Immunol. 2001; 19:375-96; the disclosure of which is incorporated herein by reference in its entirety.

[0060] “T cell” includes all types of immune cells expressing CD3, including T-helper cells (CD4⁺ cells), cytotoxic T-cells (CD8⁺ cells), T-regulatory cells (Treg), and NK-T cells.

[0061] The term “immunomodulatory polypeptide” (also referred to as a “co-stimulatory polypeptide”), as used herein, includes a polypeptide on an antigen presenting cell (APC) (e.g., a dendritic cell, a B cell, and the like), or a portion of the polypeptide on an APC, that specifically binds a cognate co-immunomodulatory polypeptide on a T cell, thereby providing a signal which, in addition to the primary signal provided by, for instance, binding of a TCR/CD3 complex with a major histocompatibility complex (MHC) polypeptide loaded with peptide, mediates a T cell response, including, but not limited to, proliferation, activation, differentiation, and the like. An immunomodulatory polypeptide can include, but is not limited to, CD7, B7-1 (CD80), B7-2 (CD86), PD-L1, PD-L2, 4-1BBL, OX40L, Fas ligand (FasL), inducible costimulatory ligand (ICOS-L), intercellular adhesion molecule (ICAM), CD30L, CD40, CD70, CD83, HLA-G, MICA, MICB, HVEM, lymphotoxin beta receptor, 3/TR6, ILT3, ILT4, HVEM, an agonist or antibody that binds Toll ligand receptor and a ligand that specifically binds with B7-H3. A co-stimulatory polypeptide also encompasses, inter alia, an antibody that specifically binds with a cognate co-stimulatory molecule present on a T cell, such as, but not limited to, IL-2, CD27, CD28, 4-1BB, OX40, CD30, CD40, PD-1, ICOS, lymphocyte function-associated antigen-1 (LFA-1), CD2, LIGHT, NKG2C, B7-H3, and a ligand that specifically binds to CD83.

[0062] As noted above, an “immunomodulatory polypeptide” (also referred to herein as a “MOD”) specifically binds a cognate co-immunomodulatory polypeptide on a T cell.

[0063] An “immunomodulatory domain” (“MOD”) of a TMAPP of the present disclosure binds a cognate co-immunomodulatory polypeptide, which may be present on a target T cell.

[0064] “Heterologous,” as used herein, means a nucleotide or polypeptide that is not found in the native nucleic acid or protein, respectively.

[0065] “Recombinant,” as used herein, means that a particular nucleic acid (DNA or RNA) is the product of various combinations of cloning, restriction, polymerase chain reaction (PCR) and/or ligation steps resulting in a construct having a structural coding or non-coding sequence distinguishable from endogenous nucleic acids found in natural systems. DNA sequences encoding polypeptides can be assembled from cDNA fragments or from a series of synthetic oligonucleotides, to provide a synthetic nucleic acid which is capable of being expressed from a recombinant transcriptional unit contained in a cell or in a cell-free transcription and translation system.

[0066] The terms “recombinant expression vector,” or “DNA construct” are used interchangeably herein to refer to a DNA molecule comprising a vector and at least one insert. Recombinant expression vectors are usually generated for the purpose of expressing and/or propagating the insert(s), or for the construction of other recombinant nucleotide sequences. The insert(s) may or may not be operably linked to a promoter sequence and may or may not be operably linked to DNA regulatory sequences.

[0067] As used herein, the term “affinity” refers to the equilibrium constant for the reversible binding of two agents (e.g., an antibody and an antigen) and is expressed as a dissociation constant (K_{D}). Affinity can be at least 1-fold greater, at least 2-fold greater, at least 3-fold greater, at least 4-fold greater, at least 5-fold greater, at least 6-fold greater, at least 7-fold greater, at least 8-fold greater, at least 9-fold greater, at least 10-fold greater, at least 20-fold greater, at least 30-fold greater, at least 40-fold greater, at least 50-fold greater, at least 60-fold greater, at least 70-fold greater, at least 80-fold greater, at least 90-fold greater, at least 100-fold greater, or at least 1,000-fold greater, or more, than the affinity of an antibody for unrelated amino acid sequences. Affinity of an antibody to a target protein can be, for example, from about 100 nanomolar (nM) to about 0.1 nM, from about 100 nM to about 1 picomolar (pM), or from about 100 nM to about 1 femtomolar (fM) or more. As used herein, the term “avidity” refers to the resistance of a complex of two or more agents to dissociation after dilution.

[0068] The term “binding” refers to a direct association between two molecules, due to, for example, covalent, electrostatic, hydrophobic, and ionic and/or hydrogen-bond interactions, including interactions such as salt bridges and water bridges. “Specific binding” refers to binding with an affinity of at least about 10⁻⁷ M or greater, e.g., 5×10⁻⁷ M, 10⁻⁸ M, 5×10⁻⁸ M, and greater. “Non-specific binding” refers to binding with an affinity of less than about 10⁻⁷ M, e.g., binding with an affinity of 10⁻⁶ M, 10⁻⁵ M, 10⁻⁴ M, etc.

[0069] The terms “treatment”, “treating” and the like are used herein to generally mean obtaining a desired pharmacologic and/or physiologic effect. The effect may be prophylactic in terms of completely or partially preventing a disease or symptom thereof and/or may be therapeutic in terms of a partial or complete cure for a disease and/or adverse effect attributable to the disease. “Treatment” as used herein covers any treatment of a disease or symptom in a mammal, and includes: (a) preventing the disease or symptom from occurring in a subject which may be predisposed to acquiring the disease or symptom but has not yet been diagnosed as having it; (b) inhibiting the disease or symptom, i.e., arresting its development; and/or (c) relieving the disease, i.e., causing regression of the disease. The therapeutic agent may be administered before, during or after the onset of disease or injury. The treatment of ongoing disease, where the treatment stabilizes or reduces the undesirable clinical symptoms of the patient, is of particular interest. Such treatment is desirably performed prior to complete loss of function in the affected tissues. The subject therapy will desirably be administered during the symptomatic stage of the disease, and in some cases after the symptomatic stage of the disease.

[0070] The terms “individual,” “subject,” “host,” and “patient,” are used interchangeably herein and refer to any mammalian subject for whom diagnosis, treatment, or therapy is desired. Mammals include, e.g., humans, non-human primates, rodents (e.g., rats; mice), lagomorphs (e.g., rabbits), ungulates (e.g., cows, sheep, pigs, horses, goats, and the like), etc.

[0071] Before the present invention is further described, it is to be understood that this invention is not limited to particular embodiments described, as such may, of course, vary. It is also to be understood that the terminology used herein is for the purpose of describing particular embodiments only, and is not intended to be limiting, since the scope of the present invention will be limited only by the appended claims.

[0072] Where a range of values is provided, it is understood that each intervening value, to the tenth of the unit of the lower limit unless the context clearly dictates otherwise, between the upper and lower limit of that range and any other stated or intervening value in that stated range, is encompassed within the invention. The upper and lower limits of these smaller ranges may independently be included in the smaller ranges, and are also encompassed within the invention, subject to any specifically excluded limit in the stated range. Where the stated range includes one or both of the limits, ranges excluding either or both of those included limits are also included in the invention.

[0073] Unless defined otherwise, all technical and scientific terms used herein have the same meaning as commonly understood by one of ordinary skill in the art to which this invention belongs. Although any methods and materials similar or equivalent to those described herein can also be used in the practice or testing of the present invention, the preferred methods and materials are now described. All publications mentioned herein are incorporated herein by reference to disclose and describe the methods and/or materials in connection with which the publications are cited.

[0074] It must be noted that as used herein and in the appended claims, the singular forms “a,” “an,” and “the” include plural referents unless the context clearly dictates otherwise. Thus, for example, reference to “a Treg” includes a plurality of such Tregs and reference to “the MHC Class II alpha chain” includes reference to one or more MHC Class II alpha chains and equivalents thereof known to those skilled in the art, and so forth. It is further noted that the claims may be drafted to exclude any optional element. As such, this statement is intended to serve as antecedent basis for use of such exclusive terminology as “solely,” “only” and the like in connection with the recitation of claim elements, or use of a “negative” limitation.

[0075] It is appreciated that certain features of the invention, which are, for clarity, described in the context of separate embodiments, may also be provided in combination in a single embodiment. Conversely, various features of the invention, which are, for brevity, described in the context of a single embodiment, may also be provided separately or in any suitable sub-combination. All combinations of the embodiments pertaining to the invention are specifically embraced by the present invention and are disclosed herein just as if each and every combination was individually and explicitly disclosed. In addition, all sub-combinations of the various embodiments and elements thereof are also specifically embraced by the present invention and are disclosed herein just as if each and every such sub-combination was individually and explicitly disclosed herein.

[0076] The publications discussed herein are provided solely for their disclosure prior to the filing date of the present application. Nothing herein is to be construed as an admission that the present invention is not entitled to antedate such publication by virtue of prior invention. Further, the dates of publication provided may be different from the actual publication dates which may need to be independently confirmed.

### DETAILED DESCRIPTION

[0077] The present disclosure provides T-cell modulatory antigen-presenting polypeptides (TMAPPs) that comprise: a) a first polypeptide comprising: i) a peptide epitope; and ii) a first MHC Class II polypeptide; and b) a second polypeptide comprising a second MHC Class II polypeptide, where the first and/or the second polypeptides comprises one or more immunomodulatory polypeptides. The present disclosure provides nucleic acids comprising nucleotide sequences encoding TMAPPs of the present disclosure, as well as cells genetically modified with the nucleic acids. A TMAPP of the present disclosure is useful for modulating activity of a T cell. Thus, the present disclosure provides methods of modulating activity of a T cell.

[0078] The present disclosure provides an antigen-presenting polypeptide (APP), where an APP of the present disclosure does not include an immunomodulatory polypeptide. An APP of the present disclosure can be a single chain polypeptide or a multi-chain (multimeric) polypeptide. An APP of the present disclosure is useful for diagnostic applications and therapeutic applications.

[0079] T-CELL MODULATORY ANTIGEN-PRESENTING POLYPEPTIDES

[0080] The present disclosure provides T-cell modulatory antigen-presenting polypeptides (TMAPPs), including single-chain TMAPPs and multimeric TMAPPs. In some cases, a TMAPP of the present disclosure comprises two polypeptide chains and is sometimes referred to herein as a “multimeric T-cell modulatory antigen-presenting polypeptide.” In some cases, a TMAPP of the present disclosure comprises a single polypeptide chain. A TMAPP of the present disclosure is also referred to as a “synTac polypeptide.”

[0081] A TMAPP of the present disclosure comprises one or more immunomodulatory polypeptides. In some cases, a TMAPP of the present disclosure comprises a single immunomodulatory polypeptide. In some cases, a TMAPP of the present disclosure comprises two or more immunomodulatory polypeptides (e.g., 2, 3, 4, or 5 immunomodulatory polypeptides).

[0082] In some cases, a TMAPP of the present disclosure comprises two or more immunomodulatory polypeptides. In some cases, where a TMAPP of the present disclosure comprises a first polypeptide and a second polypeptide, the two or more immunomodulatory polypeptides are present in the first polypeptide chain only. In some cases, where a TMAPP of the present disclosure comprises a first polypeptide and a second polypeptide, the two or more immunomodulatory polypeptides are present in the second polypeptide chain only. In some cases, where a TMAPP of the present disclosure comprises a first polypeptide and a second polypeptide, at least one of the two or more immunomodulatory polypeptides are present in the first polypeptide chain; and at least one of the two or more immunomodulatory polypeptides are present in the second polypeptide chain.

[0083] In some cases, where a TMAPP of the present disclosure comprises two immunomodulatory polypeptides, the two immunomodulatory polypeptides have the same amino acid sequence, i.e., the TMAPP comprises two copies of an immunomodulatory polypeptide. In some cases, where a TMAPP of the present disclosure comprises two immunomodulatory polypeptides, the two immunomodulatory polypeptides do not have the same amino acid sequence; e.g., one of the two immunomodulatory polypeptides comprises a first amino acid sequence and the second of the two immunomodulatory polypeptides comprises a second amino acid sequence, where the first and the second amino acid sequences are not identical. In some cases, the first and the second amino acid sequences differ from one another in amino acid sequence by from 1 amino acid to 10 amino acids, from 10 amino acids to 25 amino acids, or more than 25 amino acids. In some cases, the first and the second amino acid sequences share less than 98%, less than 95%, less than 90%, less than 85%, less than 80%, less than 75%, or less than 70%, amino acid sequence identity with one another.

[0084] A TMAPP of the present disclosure modulates activity of a T cell. In some cases, a TMAPP of the present disclosure reduces activity of an autoreactive T cell and/or an autoreactive B cell. In some cases, a TMAPP of the present disclosure increases the number and/or activity of a regulator T cell (Treg), resulting in reduced activity of an autoreactive T cell and/or an autoreactive B cell.

[0085] Immunomodulatory polypeptides that are suitable for inclusion in a TMAPP of the present disclosure include, but are not limited to, IL-2, transforming growth factor-beta (TGFβ), JAG1, CD7, B7-1 (CD80), B7-2 (CD86), PD-L1, PD-L2, 4-1BBL, OX40L, Fas ligand (FasL), inducible costimulatory ligand (ICOS-L), intercellular adhesion molecule (ICAM), CD30L, CD40, CD70, CD83, HLA-G, MICA, MICB, HVEM, lymphotoxin beta receptor, 3/TR6, ILT3, ILT4, HVEM. In some cases, an immunomodulatory polypeptide suitable for inclusion in a TMAPP of the present disclosure is a variant that comprises from 1 to 10 amino acid substitutions relative to a wild-type or naturally-occurring immunomodulatory polypeptide, and that exhibits reduced affinity to its cognate co-immunomodulatory polypeptide (e.g., a co-immunomodulatory polypeptide present on the surface of a T cell), compared to the affinity of the wild-type or naturally-occurring immunomodulatory polypeptide for the cognate co-immunomodulatory polypeptide.

[0086] Multimeric T-Cell Modulatory Antigen-Presenting Polypeptides

[0087] A TMAPP of the present disclosure comprises: i) a peptide epitope (a peptide recognized and bound by a TCR); ii) an MHC Class II α chain polypeptide; iii) an MHC Class II 0 chain polypeptide; and iv) an immunomodulatory polypeptide (also referred to herein as a “MOD polypeptide” or a “MOD domain”). In some cases, the TMAPP comprises two polypeptide chains; such a TMAPP is referred to herein as a multimeric TMAPP. A TMAPP of the present disclosure can further include one or both of: a dimerizer polypeptide; and an immunoglobulin scaffold (e.g., an Ig Fc polypeptide) or a non-immunoglobulin scaffold. Non-limiting example of multimeric TMAPPs of the present disclosure is schematically depicted in FIG. 1A-1E, FIG. 2A-2D, and FIG. 3A-3C.

[0088] In some cases, a TMAPP of the present disclosure comprises a single immunomodulatory polypeptide. In some cases, a TMAPP of the present disclosure comprises 2 copies of an immunomodulatory polypeptide. In some cases, a TMAPP of the present disclosure comprises 3 copies of an immunomodulatory polypeptide. Where a TMAPP of the present disclosure comprises 2 or 3 copies of an immunomodulatory polypeptide, in some cases, the 2 or 3 copies are in tandem. Where a TMAPP of the present disclosure comprises 2 or 3 copies of an immunomodulatory polypeptide, in some cases, the 2 or 3 copies are separated from one another by a linker.

[0089] A TMAPP of the present disclosure can include one or more linkers, where the one or more linkers are between one or more of: i) an MHC Class II polypeptide and an Ig Fc polypeptide, where such a linker is referred to herein as “L1”; ii) an immunomodulatory polypeptide and an MHC Class II polypeptide, where such a linker is referred to herein as “L2”; iii) a first immunomodulatory polypeptide and a second immunomodulatory polypeptide, where such a linker is referred to herein as “L3”; iv) a peptide antigen (“epitope”) and an MHC Class II polypeptide; v) an MHC Class II polypeptide and a dimerization polypeptide (e.g., a first or a second member of a dimerizing pair); and vi) a dimerization polypeptide (e.g., a first or a second member of a dimerizing pair) and an IgFc polypeptide. In some cases, an L1 linker comprises (GGGGS)n (SEQ ID NO: 1), where n is 1, 2, 3, 4, 5, 6, 7, or 8. In some cases, an L2 linker comprises (GGGGS)n (SEQ ID NO: 1), where n is 1, 2, 3, 4, 5, 6, 7, or 8. In some cases, an L3 linker comprises (GGGGS)n (SEQ ID NO: 1), where n is 1, 2, 3, 4, 5, 6, 7, or 8. In some cases, a linker comprises the amino acid sequence GGSAAAGG (SEQ ID NO: 2).

[0090] In some cases, a TMAPP of the present disclosure comprises: a) a first polypeptide comprising, in order from N-terminus to C-terminus: i) a peptide antigen (an “epitope”) that is recognized (e.g., is capable of being recognized and bound) by a TCR; ii) an MHC Class II β1 polypeptide; and iii) an MHC Class II β2 polypeptide; and b) a second polypeptide comprising: i) an immunomodulatory polypeptide; ii) an MHC Class II α1 polypeptide; and iii) an MHC Class II α2 polypeptide. In some cases, a TMAPP of the present disclosure comprises: a) a first polypeptide comprising, in order from N-terminus to C-terminus: i) a peptide antigen (an “epitope”) that is recognized (e.g., is capable of being recognized and bound) by a TCR; ii) an MHC Class II β1 polypeptide; and iii) an MHC Class II β2 polypeptide; and b) a second polypeptide comprising: i) an immunomodulatory polypeptide; ii) an MHC Class II α1 polypeptide; iii) an MHC Class II α2 polypeptide; and iv) an Ig Fc polypeptide. The arrangement (N-terminus to C-terminus order) of the immunomodulatory polypeptide, the MHC Class II α1 polypeptide, the MHC Class II α2 polypeptide, and the Ig Fc polypeptide, can vary. As one example of a possible arrangement, in some cases, a TMAPP of the present disclosure comprises: a) a first polypeptide comprising, in order from N-terminus to C-terminus: i) a peptide antigen (an “epitope”) that is recognized (e.g., is capable of being recognized and bound) by a TCR; ii) an MHC Class II β1 polypeptide; and iii) an MHC Class II β2 polypeptide; and b) a second polypeptide comprising, in order from N-terminus to C-terminus: i) an immunomodulatory polypeptide; ii) an MHC Class II α1 polypeptide; iii) an MHC Class II α2 polypeptide; and iv) an Ig Fc polypeptide. This arrangement is depicted schematically in FIG. 1A. As another example of a possible arrangement, in some cases, a TMAPP of the present disclosure comprises: a) a first polypeptide comprising, in order from N-terminus to C-terminus: i) a peptide antigen (an “epitope”) that is recognized (e.g., is capable of being recognized and bound) by a TCR; ii) an MHC Class II β1 polypeptide; and iii) an MHC Class II β2 polypeptide; and b) a second polypeptide comprising, in order from N-terminus to C-terminus: i) an MHC Class II α1 polypeptide; ii) an MHC Class II α2 polypeptide; iii) an Ig Fc polypeptide; and iv) an immunomodulatory polypeptide. This arrangement is depicted schematically in FIG. 1B. As another example of a possible arrangement, in some cases, a TMAPP of the present disclosure comprises: a) a first polypeptide comprising, in order from N-terminus to C-terminus: i) a peptide antigen (an “epitope”) that is recognized (e.g., is capable of being recognized and bound) by a TCR; ii) an MHC Class II β1 polypeptide; and iii) an MHC Class II β2 polypeptide; and b) a second polypeptide comprising, in order from N-terminus to C-terminus: i) an MHC Class II α1 polypeptide; ii) an MHC Class II α2 polypeptide; iii) an immunomodulatory polypeptide; and iv) an Ig Fc polypeptide. This arrangement is depicted schematically in FIG. 1C. The immunomodulatory polypeptide(s) can be on the same polypeptide chain as the MHC Class II α1 and α2 polypeptides, as illustrated schematically in FIG. 1A-1C. Alternatively, the peptide antigen (“epitope”) can be on the same polypeptide chain as the MHC Class II β1 and 32 polypeptides, as illustrated schematically in FIG. 1D and FIG. 1E. For example, in some cases, a TMAPP of the present disclosure comprises: a) a first polypeptide comprising, in order from N-terminus to C-terminus: i) an immunomodulatory polypeptide; ii) a peptide antigen (an “epitope”) that is recognized (e.g., is capable of being recognized and bound) by a TCR; iii) an MHC Class II β1 polypeptide; and iv) an MHC Class II β2 polypeptide; and b) a second polypeptide comprising, in order from N-terminus to C-terminus: i) an MHC Class II α1 polypeptide; ii) an MHC Class II α2 polypeptide; and iii) an Ig Fc polypeptide. This arrangement is depicted schematically in FIG. 1D. As another example, in some cases, a TMAPP of the present disclosure comprises: a) a first polypeptide comprising, in order from N-terminus to C-terminus: i) a peptide antigen (an “epitope”) that is recognized (e.g., is capable of being recognized and bound) by a TCR; ii) an MHC Class II β1 polypeptide; iii) an MHC Class II β2 polypeptide; and iv) an immunomodulatory polypeptide; and b) a second polypeptide comprising, in order from N-terminus to C-terminus: i) an MHC Class II α1 polypeptide; ii) an MHC Class II α2 polypeptide; and iii) an Ig Fc polypeptide. This arrangement is depicted schematically in FIG. 1E. In any one of the above embodiments, the TMAPP can include a single immunomodulatory polypeptide. In any one of the above embodiments, the TMAPP can include 2 copies of the immunomodulatory polypeptide; the 2 copies can be in tandem, or can be separated by a linker. In any one of the above embodiments, the TMAPP can include 3 copies of the immunomodulatory polypeptide; the 3 copies can be in tandem, or can be separated by a linker. Where a TMAPP of the present disclosure comprises two immunomodulatory polypeptides, in some cases, the first immunomodulatory polypeptide is linked to the second immunomodulatory polypeptide by a linker (an “L3” linker); e.g., a linker of from about 2 amino acids to 50 amino acids in length. Suitable L3 linkers include (GGGGS)n (SEQ ID NO: 1), where n is 1, 2, 3, 4, 5, 6, 7, or 8. In some cases, the TMAPP comprises a linker (an “L1”) between the MHC polypeptide and the Ig Fc polypeptide; where exemplary suitable linkers include (GGGGS)n (SEQ ID NO: 1), where n is 1, 2, 3, 4, 5, 6, 7, or 8. In some cases, the TMAPP comprises a linker (an “L2”) between the immunomodulatory polypeptide and the MHC polypeptide, where exemplary suitable linkers include (GGGGS)n (SEQ ID NO: 1), where n is 1, 2, 3, 4, 5, 6, 7, or 8. In some cases, where the TMAPP comprises two immunomodulatory polypeptides, in some cases, the two immunomodulatory polypeptides are separated by a linker (an “L3); where exemplary suitable linkers include (GGGGS)n (SEQ ID NO: 1), where n is 1, 2, 3, 4, 5, 6, 7, or 8. In some cases, the linker between any two components of the TMAPP comprises the amino acid sequence GGSAAAGG (SEQ ID NO: 2). In any of the above embodiments, in some cases, the Ig Fc is an IgG1 Fc polypeptide. In any of the above embodiments, in some cases, the Ig Fc is an IgG4 Fc polypeptide. In any of the above embodiments, in some cases, the immunomodulatory polypeptide is a PD-L1 polypeptide. In any of the above embodiments, in some cases, the immunomodulatory polypeptide is a TGF-β polypeptide. In any of the above embodiments, in some cases, the immunomodulatory polypeptide is a FasL polypeptide. In some cases, the epitope is an auto-epitope (an epitope of a self antigen). In some cases, the epitope is a T1D-associated self epitope. For example, some cases, the peptide epitope is a proinsulin peptide. In some cases, the epitope is a celiac disease-associated self epitope.

[0091] The two polypeptide chains of a TMAPP of the present disclosure can be covalently linked, e.g., via a disulfide bond. The two polypeptide chains of a TMAPP of the present disclosure can also associate with one another non-covalently. The two polypeptide chains of a TMAPP of the present disclosure can be linked via interaction between a first dimerization domain present in the first polypeptide, and a second dimerization domain present in the second polypeptide. For example, the first polypeptide chain of a TMAPP of the present disclosure can include an Ig CH1 polypeptide as a first dimerization domain; and the second polypeptide chain of a TMAPP of the present disclosure can include the constant region of an immunoglobulin κ chain, as the second dimerization domain.

[0092] A suitable Ig CH1 polypeptide has a length of from about 90 amino acids to about 120 amino acids (e.g., from about 90 amino acids to about 95 amino acids, from about 95 amino acids to about 100 amino acids, from about 100 amino acids to about 105 amino acids, from about 105 amino acids to about 110 amino acids, from about 110 amino acids to about 115 amino acids, or from about 110 amino acids to about 120 amino acids); and can comprise an amino acid sequence having at least 60%, at least 70%, at least 80%, at least 90%, at least 95%, at least 98%, at least 99%, or 100%, amino acid sequence identity to the following CH1 amino acid sequence:

(SEQ ID NO: 3)
ASTKGPSVFPLAPSSKSTSGGTAALGCLVKDYFPEPVTVSWNSGALTSG
VHTFPAVLQSSGLYSLSSVVTVPSSSLGTQTYICNVNHKPSNTKVDKKV
EPKSCDKT.

[0093] A suitable Ig κ chain constant region polypeptide has a length of from about 90 amino acids to about 120 amino acids (e.g., from about 90 amino acids to about 95 amino acids, from about 95 amino acids to about 100 amino acids, from about 100 amino acids to about 105 amino acids, from about 105 amino acids to about 110 amino acids, from about 110 amino acids to about 115 amino acids, or from about 110 amino acids to about 120 amino acids); and can comprise an amino acid sequence having at least 60%, at least 70%, at least 80%, at least 90%, at least 95%, at least 98%, at least 99%, or 100%, amino acid sequence identity to the following κ chain constant region amino acid sequence:

(SEQ ID NO: 4)
TVAAPSVFIFPPSDEQLKSGTASVVCLLNNFYPREAKVQWKVDNALQSG
NSQESVTEQDSKDSTYSLSSTLTLSKADYEKHKVYACEVTHQGLSSPVT
KSFNRGEC.

[0094] In some cases, a TMAPP of the present disclosure comprises: a) a first polypeptide comprising, in order from N-terminus to C-terminus: i) a peptide antigen (an “epitope”) that is recognized (e.g., is capable of being recognized and bound) by a TCR; ii) an MHC Class II β1 polypeptide; iii) an MHC Class II β2 polypeptide; and iv) an Ig κ chain constant region polypeptide; and b) a second polypeptide comprising: i) an immunomodulatory polypeptide; ii) an MHC Class II α1 polypeptide; iii) an MHC Class II α2 polypeptide; and iv) a CH1 polypeptide. In some cases, a TMAPP of the present disclosure comprises: a) a first polypeptide comprising, in order from N-terminus to C-terminus: i) a peptide antigen (an “epitope”) that is recognized (e.g., is capable of being recognized and bound) by a TCR; ii) an MHC Class II β1 polypeptide; iii) an MHC Class II β2 polypeptide; and iv) an Ig κ chain constant region polypeptide; and b) a second polypeptide comprising: i) an immunomodulatory polypeptide; ii) an MHC Class II α1 polypeptide; iii) an MHC Class II α2 polypeptide; iv) a CH1 polypeptide; and v) an Ig Fc polypeptide. In some cases, a TMAPP of the present disclosure comprises: a) a first polypeptide comprising, in order from N-terminus to C-terminus: i) a peptide antigen (an “epitope”) that is recognized (e.g., is capable of being recognized and bound) by a TCR; ii) an MHC Class II β1 polypeptide; iii) an MHC Class II β2 polypeptide; and iv) an Ig κ chain constant region polypeptide; and b) a second polypeptide comprising, in order from N-terminus to C-terminus: i) an immunomodulatory polypeptide; ii) an MHC Class II α1 polypeptide; iii) an MHC Class II α2 polypeptide; iv) a CH1 polypeptide; and v) an Ig Fc polypeptide. An example of such a TMAPP is depicted schematically in FIG. 2A. In some cases, a TMAPP of the present disclosure comprises: a) a first polypeptide comprising, in order from N-terminus to C-terminus: i) a peptide antigen (an “epitope”) that is recognized (e.g., is capable of being recognized and bound) by a TCR; ii) an MHC Class II β1 polypeptide; iii) an MHC Class II β2 polypeptide; and iv) an Ig κ chain constant region polypeptide; and b) a second polypeptide comprising, in order from N-terminus to C-terminus: i) an MHC Class II α1 polypeptide; ii) an MHC Class II α2 polypeptide; iii) an immunomodulatory polypeptide; iv) a CH1 polypeptide; and v) an Ig Fc polypeptide. An example of such a TMAPP is depicted schematically in FIG. 2B. As another example of a possible arrangement, in some cases, a TMAPP of the present disclosure comprises: a) a first polypeptide comprising, in order from N-terminus to C-terminus: i) a peptide antigen (an “epitope”) that is recognized (e.g., is capable of being recognized and bound) by a TCR; ii) an MHC Class II β1 polypeptide; iii) an MHC Class II β2 polypeptide; and iv) an Ig K constant region polypeptide; and b) a second polypeptide comprising, in order from N-terminus to C-terminus: i) an MHC Class II α1 polypeptide; ii) an MHC Class II α2 polypeptide; iii) a CH1 polypeptide; iv) an immunomodulatory polypeptide; and v) an Ig Fc polypeptide. This arrangement is depicted schematically in FIG. 2C. In some cases, a TMAPP of the present disclosure comprises: a) a first polypeptide comprising, in order from N-terminus to C-terminus: i) a peptide antigen (an “epitope”) that is recognized (e.g., is capable of being recognized and bound) by a TCR; ii) an MHC Class II β1 polypeptide; iii) an MHC Class II β2 polypeptide; and iv) an Ig κ chain constant region polypeptide; and b) a second polypeptide comprising, in order from N-terminus to C-terminus: i) an MHC Class II α1 polypeptide; ii) an MHC Class II α2 polypeptide; iii) a CH1 polypeptide; iv an Ig Fc polypeptide; and v) an immunomodulatory polypeptide. An example of such a TMAPP is depicted schematically in FIG. 2D. In any one of the above embodiments, the TMAPP can include a single immunomodulatory polypeptide. In any one of the above embodiments, the TMAPP can include 2 copies of the immunomodulatory polypeptide; the 2 copies can be in tandem, or can be separated by a linker. In any one of the above embodiments, the TMAPP can include 3 copies of the immunomodulatory polypeptide; the 3 copies can be in tandem, or can be separated by a linker. Where a TMAPP of the present disclosure comprises two immunomodulatory polypeptides, in some cases, the first immunomodulatory polypeptide is linked to the second immunomodulatory polypeptide by a linker (an “L3” linker); e.g., a linker of from about 2 amino acids to 50 amino acids in length. Suitable L3 linkers include (GGGGS)n (SEQ ID NO: 1), where n is 1, 2, 3, 4, 5, 6, 7, or 8. In some cases, the TMAPP comprises a linker (an “L1”) between the MHC polypeptide and the Ig Fc polypeptide; where exemplary suitable linkers include (GGGGS)n (SEQ ID NO: 1), where n is 1, 2, 3, 4, 5, 6, 7, or 8. In some cases, the TMAPP comprises a linker (an “L2”) between the immunomodulatory polypeptide and the MHC polypeptide, where exemplary suitable linkers include (GGGGS)n (SEQ ID NO: 1), where n is 1, 2, 3, 4, 5, 6, 7, or 8. In some cases, where the TMAPP comprises two immunomodulatory polypeptides, in some cases, the two immunomodulatory polypeptides are separated by a linker (an “L3); where exemplary suitable linkers include (GGGGS)n (SEQ ID NO: 1), where n is 1, 2, 3, 4, 5, 6, 7, or 8. In some cases, the linker between any two components of the TMAPP comprises the amino acid sequence GGSAAAGG (SEQ ID NO: 2). In any of the above embodiments, in some cases, the Ig Fc is an IgG1 Fc polypeptide. In any of the above embodiments, in some cases, the Ig Fc is an IgG4 Fc polypeptide. In any of the above embodiments, in some cases, the Ig Fc is an IgG1 Fc polypeptide. In any of the above embodiments, in some cases, the Ig Fc is an IgG4 Fc polypeptide. In any of the above embodiments, in some cases, the immunomodulatory polypeptide is a PD-L1 polypeptide. In any of the above embodiments, in some cases, the immunomodulatory polypeptide is a TGF-β polypeptide. In any of the above embodiments, in some cases, the immunomodulatory polypeptide is a FasL polypeptide. In some cases, the epitope is an auto-epitope (an epitope of a self antigen). In some cases, the epitope is a T1D-associated self epitope. For example, some cases, the peptide epitope is a proinsulin peptide. In some cases, the epitope is a celiac disease-associated self epitope.

[0095] In some cases, a TMAPP of the present disclosure comprises: a) a first polypeptide comprising: i) a peptide antigen (an “epitope”) that is recognized (e.g., is capable of being recognized and bound) by a TCR; ii) an MHC Class II β1 polypeptide; iii) an MHC Class II β2 polypeptide; iv) an immunomodulatory polypeptide; and v) an Ig κ chain constant region polypeptide; and b) a second polypeptide comprising: i) an MHC Class II α1 polypeptide; ii) an MHC Class II α2 polypeptide; and iii) a CH1 polypeptide. In some cases, a TMAPP of the present disclosure comprises: a) a first polypeptide comprising: i) a peptide antigen (an “epitope”) that is recognized (e.g., is capable of being recognized and bound) by a TCR; ii) an MHC Class II β1 polypeptide; iii) an MHC Class II β2 polypeptide; iv) an immunomodulatory polypeptide; and v) an Ig κ chain constant region polypeptide; and b) a second polypeptide comprising: i) an MHC Class II α1 polypeptide; ii) an MHC Class II α2 polypeptide; iii) a CH1 polypeptide; and v) an Ig Fc polypeptide. As an example, in some cases, a TMAPP of the present disclosure comprises, in order from N-terminus to C-terminus: i) an immunomodulatory polypeptide; ii) a peptide antigen (an “epitope”) that is recognized (e.g., is capable of being recognized and bound) by a TCR; iii) an MHC Class II β1 polypeptide; iv) an MHC Class II β2 polypeptide; and v) an Ig κ chain constant region polypeptide; and b) a second polypeptide comprising, in order from N-terminus to C-terminus: i) an MHC Class II α1 polypeptide; ii) an MHC Class II α2 polypeptide; iii) a CH1 polypeptide; and v) an Ig Fc polypeptide. Such a TMAPP is depicted schematically in FIG. 3A. As another example, in some cases, a TMAPP of the present disclosure comprises, in order from N-terminus to C-terminus: i) a peptide antigen (an “epitope”) that is recognized (e.g., is capable of being recognized and bound) by a TCR; ii) an MHC Class II β1 polypeptide; iii) an MHC Class II β2 polypeptide; iv) an immunomodulatory polypeptide; and v) an Ig κ chain constant region polypeptide; and b) a second polypeptide comprising, in order from N-terminus to C-terminus: i) an MHC Class II α1 polypeptide; ii) an MHC Class II α2 polypeptide; iii) a CH1 polypeptide; and v) an Ig Fc polypeptide. Such a TMAPP is depicted schematically in FIG. 3B. As another example, in some cases, a TMAPP of the present disclosure comprises, in order from N-terminus to C-terminus: i) a peptide antigen (an “epitope”) that is recognized (e.g., is capable of being recognized and bound) by a TCR; ii) an MHC Class II β1 polypeptide; iii) an MHC Class II β2 polypeptide; iv) an Ig κ chain constant region polypeptide; and v) an immunomodulatory polypeptide; and b) a second polypeptide comprising, in order from N-terminus to C-terminus: i) an MHC Class II α1 polypeptide; ii) an MHC Class II α2 polypeptide; iii) a CH1 polypeptide; and v) an Ig Fc polypeptide. Such a TMAPP is depicted schematically in FIG. 3C. In any one of the above embodiments, the TMAPP can include a single immunomodulatory polypeptide. In any one of the above embodiments, the TMAPP can include 2 copies of the immunomodulatory polypeptide; the 2 copies can be in tandem, or can be separated by a linker. In any one of the above embodiments, the TMAPP can include 3 copies of the immunomodulatory polypeptide; the 3 copies can be in tandem, or can be separated by a linker. Where a TMAPP of the present disclosure comprises two immunomodulatory polypeptides, in some cases, the first immunomodulatory polypeptide is linked to the second immunomodulatory polypeptide by a linker (an “L3” linker); e.g., a linker of from about 2 amino acids to 50 amino acids in length. Suitable L3 linkers include (GGGGS)n (SEQ ID NO: 1), where n is 1, 2, 3, 4, 5, 6, 7, or 8. In some cases, the TMAPP comprises a linker (an “L1”) between the MHC polypeptide and the Ig Fc polypeptide; where exemplary suitable linkers include (GGGGS)n (SEQ ID NO: 1), where n is 1, 2, 3, 4, 5, 6, 7, or 8. In some cases, the TMAPP comprises a linker (an “L2”) between the immunomodulatory polypeptide and the MHC polypeptide, where exemplary suitable linkers include (GGGGS)n (SEQ ID NO: 1), where n is 1, 2, 3, 4, 5, 6, 7, or 8. In some cases, where the TMAPP comprises two immunomodulatory polypeptides, in some cases, the two immunomodulatory polypeptides are separated by a linker (an “L3); where exemplary suitable linkers include (GGGGS)n (SEQ ID NO: 1), where n is 1, 2, 3, 4, 5, 6, 7, or 8. In some cases, the linker between any two components of the TMAPP comprises the amino acid sequence GGSAAAGG (SEQ ID NO: 2). In any of the above embodiments, in some cases, the Ig Fc is an IgG1 Fc polypeptide. In any of the above embodiments, in some cases, the Ig Fc is an IgG4 Fc polypeptide. In any of the above embodiments, in some cases, the immunomodulatory polypeptide is a PD-L1 polypeptide. In any of the above embodiments, in some cases, the immunomodulatory polypeptide is a TGF-β polypeptide. In any of the above embodiments, in some cases, the immunomodulatory polypeptide is a FasL polypeptide. In some cases, the epitope is an auto-epitope (an epitope of a self antigen). In some cases, the epitope is a T1D-associated self epitope. For example, some cases, the peptide epitope is a proinsulin peptide. In some cases, the epitope is a celiac disease-associated self epitope.

[0096] In some cases, a TMAPP of the present disclosure comprises: a) a first polypeptide comprising, in order from N-terminus to C-terminus: i) a peptide antigen (an “epitope”) that is recognized (e.g., is capable of being recognized and bound) by a TCR; ii) an MHC Class II β1 polypeptide; iii) an MHC Class II α1 polypeptide; and iv) an MHC Class II α2 polypeptide; and b) a second polypeptide comprising: i) an immunomodulatory polypeptide; and ii) an MHC Class II β2 polypeptide. In some cases, the second polypeptide comprises, in order from N-terminus to C-terminus: i) an immunomodulatory polypeptide; and ii) an MHC Class II β2 polypeptide. In some cases, a TMAPP of the present disclosure comprises: a) a first polypeptide comprising, in order from N-terminus to C-terminus: i) a peptide antigen (an “epitope”) that is recognized (e.g., is capable of being recognized and bound) by a TCR; ii) an MHC Class II β1 polypeptide; iii) an MHC Class II α1 polypeptide; iv) an MHC Class II α2 polypeptide; and v) an immunoglobulin or non-immunoglobulin scaffold polypeptide; and b) a second polypeptide comprising: i) an immunomodulatory polypeptide; and ii) an MHC Class II β2 polypeptide. In some cases, the second polypeptide comprises, in order from N-terminus to C-terminus: i) an immunomodulatory polypeptide; and ii) an MHC Class II β2 polypeptide. In some cases, a TMAPP of the present disclosure comprises: a) a first polypeptide comprising, in order from N-terminus to C-terminus: i) a peptide antigen (an “epitope”) that is recognized (e.g., is capable of being recognized and bound) by a TCR; ii) an MHC Class II β1 polypeptide; iii) an MHC Class II α1 polypeptide; iv) an MHC Class II α2 polypeptide; and v) an Ig Fc polypeptide; and b) a second polypeptide comprising: i) an immunomodulatory polypeptide; and ii) an MHC Class II β2 polypeptide. In some cases, the second polypeptide comprises, in order from N-terminus to C-terminus: i) an immunomodulatory polypeptide; and ii) an MHC Class II β2 polypeptide. In some cases, a TMAPP of the present disclosure comprises: a) a first polypeptide comprising, in order from N-terminus to C-terminus: i) a peptide antigen (an “epitope”) that is recognized (e.g., is capable of being recognized and bound) by a TCR; ii) an MHC Class II β1 polypeptide; iii) an MHC Class II α1 polypeptide; iv) an MHC Class II α2 polypeptide; and v) a first member of a dimerizer pair; and b) a second polypeptide comprising: i) an immunomodulatory polypeptide; ii) an MHC Class II β2 polypeptide; iii) a second member of the dimerizer pair. In some cases, the second polypeptide comprises, in order from N-terminus to C-terminus: i) an immunomodulatory polypeptide; ii) an MHC Class II β2 polypeptide; iii) a second member of the dimerizer pair. In some cases, a TMAPP of the present disclosure comprises: a) a first polypeptide comprising, in order from N-terminus to C-terminus: i) a peptide antigen (an “epitope”) that is recognized (e.g., is capable of being recognized and bound) by a TCR; ii) an MHC Class II β1 polypeptide; iii) an MHC Class II α1 polypeptide; iv) an MHC Class II α2 polypeptide; and v) a first leucine zipper polypeptide; and b) a second polypeptide comprising: i) an immunomodulatory polypeptide; ii) an MHC Class II β2 polypeptide; and iii) a second leucine zipper polypeptide. In some cases, the second polypeptide comprises, in order from N-terminus to C-terminus: i) an immunomodulatory polypeptide; ii) an MHC Class II β2 polypeptide; and iii) a second leucine zipper polypeptide. In some cases, a TMAPP of the present disclosure comprises: a) a first polypeptide comprising, in order from N-terminus to C-terminus: i) a peptide antigen (an “epitope”) that is recognized (e.g., is capable of being recognized and bound) by a TCR; ii) an MHC Class II β1 polypeptide; iii) an MHC Class II α1 polypeptide; iv) an MHC Class II α2 polypeptide; v) a first leucine zipper polypeptide; and vi) an Ig Fc polypeptide; and b) a second polypeptide comprising: i) an immunomodulatory polypeptide; ii) an MHC Class II β2 polypeptide; and iii) a second leucine zipper polypeptide. In some cases, the second polypeptide comprises, in order from N-terminus to C-terminus: i) an immunomodulatory polypeptide; ii) an MHC Class II β2 polypeptide; and iii) a second leucine zipper polypeptide. In any one of the above embodiments, the TMAPP can include a single immunomodulatory polypeptide. In any one of the above embodiments, the TMAPP can include 2 copies of the immunomodulatory polypeptide; the 2 copies can be in tandem, or can be separated by a linker. In any one of the above embodiments, the TMAPP can include 3 copies of the immunomodulatory polypeptide; the 3 copies can be in tandem, or can be separated by a linker. For example, in some cases, a TMAPP of the present disclosure comprises: a) a first polypeptide comprising, in order from N-terminus to C-terminus: i) a peptide antigen (an “epitope”) that is recognized (e.g., is capable of being recognized and bound) by a TCR; ii) an MHC Class II β1 polypeptide; iii) an MHC Class II α1 polypeptide; iv) an MHC Class II α2 polypeptide; v) a first leucine zipper polypeptide; and vi) an Ig Fc polypeptide; and b) a second polypeptide comprising: i) a first immunomodulatory polypeptide; ii) a second immunomodulatory polypeptide; iii) an MHC Class II β2 polypeptide; and iv) a second leucine zipper polypeptide. In some cases, the second polypeptide comprises, in order from N-terminus to C-terminus: i) a first immunomodulatory polypeptide; ii) a second immunomodulatory polypeptide; iii) an MHC Class II β2 polypeptide; and iv) a second leucine zipper polypeptide. In some cases, the first and the second immunomodulatory polypeptides comprise the same amino acid sequences. As another example, in some cases, a TMAPP of the present disclosure comprises: a) a first polypeptide comprising, in order from N-terminus to C-terminus: i) a peptide antigen (an “epitope”) that is recognized (e.g., is capable of being recognized and bound) by a TCR; ii) an MHC Class II β1 polypeptide; iii) an MHC Class II α1 polypeptide; iv) an MHC Class II α2 polypeptide; and v) an Ig Fc polypeptide; and b) a second polypeptide comprising: i) a first immunomodulatory polypeptide; ii) a second immunomodulatory polypeptide; and iii) an MHC Class II β2 polypeptide. In some cases, the second polypeptide comprises, in order from N-terminus to C-terminus: i) a first immunomodulatory polypeptide; ii) a second immunomodulatory polypeptide; and iii) an MHC Class II β2 polypeptide. In some cases, the first and the second immunomodulatory polypeptides comprise the same amino acid sequences. In some cases, a TMAPP of the present disclosure comprises: a) a first polypeptide comprising, in order from N-terminus to C-terminus: i) a peptide antigen (an “epitope”) that is recognized (e.g., is capable of being recognized and bound) by a TCR; ii) an MHC Class II β1 polypeptide; iii) an MHC Class II α1 polypeptide; and iv) an MHC Class II α2 polypeptide; and b) a second polypeptide comprising: i) an immunomodulatory polypeptide; ii) an MHC Class II β2 polypeptide; and iii) an Ig Fc polypeptide. In some cases, the second polypeptide comprises, in order from N-terminus to C-terminus: i) an immunomodulatory polypeptide; ii) an MHC Class II β2 polypeptide; and iii) an Ig Fc polypeptide. In some cases, a TMAPP of the present disclosure comprises: a) a first polypeptide comprising, in order from N-terminus to C-terminus: i) a peptide antigen (an “epitope”) that is recognized (e.g., is capable of being recognized and bound) by a TCR; ii) an MHC Class II β1 polypeptide; iii) an MHC Class II α1 polypeptide; and iv) an MHC Class II α2 polypeptide; and b) a second polypeptide comprising: i) a first immunomodulatory polypeptide; ii) a second immunomodulatory polypeptide; iii) an MHC Class II β2 polypeptide; iv) an Ig Fc polypeptide. In some cases, the second polypeptide comprises, in order from N-terminus to C-terminus: i) a first immunomodulatory polypeptide; ii) a second immunomodulatory polypeptide; iii) an MHC Class II β2 polypeptide; iv) an Ig Fc polypeptide. In some cases, the first and the second immunomodulatory polypeptides comprise the same amino acid sequence. In some cases, a TMAPP of the present disclosure comprises: a) a first polypeptide comprising, in order from N-terminus to C-terminus: i) an immunomodulatory polypeptide; ii) an MHC Class II β1 polypeptide; iii) an MHC Class II α1 polypeptide; and iv) an MHC Class II α2 polypeptide; and b) a second polypeptide comprising: i) a peptide antigen (an “epitope”) that is recognized (e.g., is capable of being recognized and bound) by a TCR; ii) an MHC Class II β2 polypeptide; and iii) an Ig Fc polypeptide. In some cases, the second polypeptide comprises, in order from N-terminus to C-terminus: i) a peptide antigen (an “epitope”) that is recognized (e.g., is capable of being recognized and bound) by a TCR; ii) an MHC Class II β2 polypeptide; and iii) an Ig Fc polypeptide. In some cases, a TMAPP of the present disclosure comprises: a) a first polypeptide comprising, in order from N-terminus to C-terminus: i) a first immunomodulatory polypeptide; ii) a second immunomodulatory polypeptide; iii) an MHC Class II β1 polypeptide; iv) an MHC Class II α1 polypeptide; and v) an MHC Class II α2 polypeptide; and b) a second polypeptide comprising, in order from N-terminus to C-terminus: i) a peptide antigen (an “epitope”) that is recognized (e.g., is capable of being recognized and bound) by a TCR; ii) an MHC Class II β2 polypeptide; and iii) an Ig Fc polypeptide. In some cases, the second polypeptide comprises, in order from N-terminus to C-terminus: i) a peptide antigen (an “epitope”) that is recognized (e.g., is capable of being recognized and bound) by a TCR; ii) an MHC Class II β2 polypeptide; and iii) an Ig Fc polypeptide. In some cases, the first and the second immunomodulatory polypeptides comprise the same amino acid sequence. Where a TMAPP of the present disclosure comprises two immunomodulatory polypeptides, in some cases, the first immunomodulatory polypeptide is linked to the second immunomodulatory polypeptide by a linker (an “L3” linker); e.g., a linker of from about 2 amino acids to 50 amino acids in length. Suitable L3 linkers include (GGGGS)n (SEQ ID NO: 1), where n is 1, 2, 3, 4, 5, 6, 7, or 8. In some cases, the TMAPP comprises a linker (an “L1”) between the MHC polypeptide and the Ig Fc polypeptide; where exemplary suitable linkers include (GGGGS)n (SEQ ID NO: 1), where n is 1, 2, 3, 4, 5, 6, 7, or 8. In some cases, the TMAPP comprises a linker (an “L2”) between the immunomodulatory polypeptide and the MHC polypeptide, where exemplary suitable linkers include (GGGGS)n (SEQ ID NO: 1), where n is 1, 2, 3, 4, 5, 6, 7, or 8. In some cases, where the TMAPP comprises two immunomodulatory polypeptides, in some cases, the two immunomodulatory polypeptides are separated by a linker (an “L3); where exemplary suitable linkers include (GGGGS)n (SEQ ID NO: 1), where n is 1, 2, 3, 4, 5, 6, 7, or 8. In some cases, the linker between any two components of the TMAPP comprises the amino acid sequence GGSAAAGG (SEQ ID NO: 2). In any of the above embodiments, in some cases, the Ig Fc is an IgG1 Fc polypeptide. In any of the above embodiments, in some cases, the Ig Fc is an IgG4 Fc polypeptide. In any of the above embodiments, in some cases, the immunomodulatory polypeptide is a PD-L1 polypeptide. In any of the above embodiments, in some cases, the immunomodulatory polypeptide is a TGF-β polypeptide. In any of the above embodiments, in some cases, the immunomodulatory polypeptide is a FasL polypeptide. In some cases, the epitope is an auto-epitope (an epitope of a self antigen). In some cases, the epitope is a T1D-associated self epitope. For example, some cases, the peptide epitope is a proinsulin peptide. In some cases, the epitope is a celiac disease-associated self epitope.

[0097] In some cases, a TMAPP of the present disclosure comprises: a) a first polypeptide comprising, in order from N-terminus to C-terminus: i) a peptide antigen (an “epitope”) that is recognized (e.g., is capable of being recognized and bound) by a TCR; ii) an MHC Class II α1 polypeptide; iii) an MHC Class II α2 polypeptide; and iv) an immunoglobulin or non-immunoglobulin scaffold polypeptide; and b) a second polypeptide comprising, in order from N-terminus to C-terminus: i) an immunomodulatory polypeptide; ii) an MHC Class II β1 polypeptide; and iii) an MHC Class II β2 polypeptide. In some cases, a TMAPP of the present disclosure comprises: a) a first polypeptide comprising, in order from N-terminus to C-terminus: i) an immunomodulatory polypeptide; ii) an MHC Class II α1 polypeptide; and iii) an MHC Class II α2 polypeptide; and iv) an immunoglobulin or non-immunoglobulin scaffold polypeptide; and b) a second polypeptide comprising, in order from N-terminus to C-terminus: i) a peptide antigen (an “epitope”) that is recognized (e.g., is capable of being recognized and bound) by a TCR; ii) an MHC Class II β1 polypeptide; and iii) an MHC Class II β2 polypeptide. In some cases, a TMAPP of the present disclosure comprises: a) a first polypeptide comprising, in order from N-terminus to C-terminus: i) a peptide antigen (an “epitope”) that is recognized (e.g., is capable of being recognized and bound) by a TCR; ii) an MHC Class II α1 polypeptide; and iii) an MHC Class II α2 polypeptide; and b) a second polypeptide comprising, in order from N-terminus to C-terminus: i) an immunomodulatory polypeptide; ii) an MHC Class II β1 polypeptide; iii) an MHC Class II β2 polypeptide; and iv) an immunoglobulin or non-immunoglobulin scaffold polypeptide. In some cases, a TMAPP of the present disclosure comprises: a) a first polypeptide comprising, in order from N-terminus to C-terminus: i) an immunomodulatory polypeptide; ii) an MHC Class II α1 polypeptide; and iii) an MHC Class II α2 polypeptide; and b) a second polypeptide comprising, in order from N-terminus to C-terminus: i) a peptide antigen (an “epitope”) that is recognized (e.g., is capable of being recognized and bound) by a TCR; ii) an MHC Class II β1 polypeptide; iii) an MHC Class II β2 polypeptide; and iv) an immunoglobulin or non-immunoglobulin scaffold polypeptide. In some cases, a TMAPP of the present disclosure comprises: a) a first polypeptide comprising, in order from N-terminus to C-terminus: i) a peptide antigen (an “epitope”) that is recognized (e.g., is capable of being recognized and bound) by a TCR; ii) an MHC Class II α1 polypeptide; iii) an MHC Class II α2 polypeptide; iv) an immunoglobulin or non-immunoglobulin scaffold polypeptide; and v) a first member of a dimerizer pair (e.g., a first leucine zipper polypeptide); and b) a second polypeptide comprising, in order from N-terminus to C-terminus: i) an immunomodulatory polypeptide; ii) an MHC Class II β1 polypeptide; iii) an MHC Class II β2 polypeptide; and iv) a second member of a dimerizer pair (e.g., a second leucine zipper polypeptide). In some cases, a TMAPP of the present disclosure comprises: a) a first polypeptide comprising, in order from N-terminus to C-terminus: i) an immunomodulatory polypeptide; ii) an MHC Class II α1 polypeptide; iii) an MHC Class II α2 polypeptide; iv) an immunoglobulin or non-immunoglobulin scaffold polypeptide; and v) and v) a first member of a dimerizer pair (e.g., a first leucine zipper polypeptide); and b) a second polypeptide comprising, in order from N-terminus to C-terminus: i) a peptide antigen (an “epitope”) that is recognized (e.g., is capable of being recognized and bound) by a TCR; ii) an MHC Class II β1 polypeptide; iii) an MHC Class II 2 polypeptide; and iv) a second member of a dimerizer pair (e.g., a second leucine zipper polypeptide). In some cases, a TMAPP of the present disclosure comprises: a) a first polypeptide comprising, in order from N-terminus to C-terminus: i) a peptide antigen (an “epitope”) that is recognized (e.g., is capable of being recognized and bound) by a TCR; ii) an MHC Class II α1 polypeptide; iii) an MHC Class II α2 polypeptide; and iv) a first member of a dimerizer pair (e.g., a first leucine zipper polypeptide); and b) a second polypeptide comprising, in order from N-terminus to C-terminus: i) an immunomodulatory polypeptide; ii) an MHC Class II β1 polypeptide; iii) an MHC Class II β2 polypeptide; iv) an immunoglobulin or non-immunoglobulin scaffold polypeptide; and v) a second member of a dimerizer pair (e.g., a second leucine zipper polypeptide). In some cases, a TMAPP of the present disclosure comprises: a) a first polypeptide comprising, in order from N-terminus to C-terminus: i) an immunomodulatory polypeptide; ii) an MHC Class II α1 polypeptide; iii) an MHC Class II α2 polypeptide; and iv) a first member of a dimerizer pair (e.g., a first leucine zipper polypeptide); and b) a second polypeptide comprising, in order from N-terminus to C-terminus: i) a peptide antigen (an “epitope”) that is recognized (e.g., is capable of being recognized and bound) by a TCR; ii) an MHC Class II β1 polypeptide; iii) an MHC Class II β2 polypeptide; iv) an immunoglobulin or non-immunoglobulin scaffold polypeptide; and v) a second member of a dimerizer pair (e.g., a second leucine zipper polypeptide). In any one of the above embodiments, the TMAPP can include 2 copies of the immunomodulatory polypeptide; the 2 copies can be in tandem, or can be separated by a linker. In any one of the above embodiments, the TMAPP can include 3 copies of the immunomodulatory polypeptide; the 3 copies can be in tandem, or can be separated by a linker. In some cases, the TMAPP comprises a linker (an “L1”) between the MHC polypeptide and the Ig Fc polypeptide; where exemplary suitable linkers include (GGGGS)n (SEQ ID NO:1), where n is 1, 2, 3, 4, 5, 6, 7, or 8. In some cases, the TMAPP comprises a linker (an “L1”) between the MHC polypeptide and the Ig Fc polypeptide; where exemplary suitable linkers include (GGGGS)n (SEQ ID NO: 1), where n is 1, 2, 3, 4, 5, 6, 7, or 8. In some cases, the TMAPP comprises a linker (an “L2”) between the immunomodulatory polypeptide and the MHC polypeptide, where exemplary suitable linkers include (GGGGS)n (SEQ ID NO: 1), where n is 1, 2, 3, 4, 5, 6, 7, or 8. In some cases, where the TMAPP comprises two immunomodulatory polypeptides, in some cases, the two immunomodulatory polypeptides are separated by a linker (an “L3); where exemplary suitable linkers include (GGGGS)n (SEQ ID NO: 1), where n is 1, 2, 3, 4, 5, 6, 7, or 8. In some cases, the linker between any two components of the TMAPP comprises the amino acid sequence GGSAAAGG (SEQ ID NO: 2). In any of the above embodiments, in some cases, the Ig Fc is an IgG1 Fc polypeptide. In any of the above embodiments, in some cases, the Ig Fc is an IgG4 Fc polypeptide. In any of the above embodiments, in some cases, the immunomodulatory polypeptide is a PD-L1 polypeptide. In any of the above embodiments, in some cases, the immunomodulatory polypeptide is a TGF-β polypeptide. In any of the above embodiments, in some cases, the immunomodulatory polypeptide is a FasL polypeptide. In some cases, the epitope is an auto-epitope (an epitope of a self antigen). In some cases, the epitope is a T1D-associated self epitope. For example, some cases, the peptide epitope is a proinsulin peptide. In some cases, the epitope is a celiac disease-associated self epitope.

[0098] In some cases, a TMAPP of the present disclosure comprises: a) a first polypeptide comprising, in order from N-terminus to C-terminus: i) a peptide antigen (an “epitope”) that is recognized (e.g., is capable of being recognized and bound) by a TCR; ii) an MHC Class II β1 polypeptide; iii) an MHC Class II β2 polypeptide; and iv) an immunomodulatory polypeptide; and b) a second polypeptide comprising, in order from N-terminus to C-terminus: i) an MHC Class II α1 polypeptide; and ii) an MHC Class II α2 polypeptide. In some cases, a TMAPP of the present disclosure comprises: a) a first polypeptide comprising, in order from N-terminus to C-terminus: i) a peptide antigen (an “epitope”) that is recognized (e.g., is capable of being recognized and bound) by a TCR; ii) an MHC Class II β1 polypeptide; iii) an MHC Class II β2 polypeptide; and iv) an immunomodulatory polypeptide; and b) a second polypeptide comprising, in order from N-terminus to C-terminus: i) an MHC Class II α1 polypeptide; ii) an MHC Class II α2 polypeptide; and iii) an immunoglobulin or non-immunoglobulin scaffold polypeptide. In some cases, a TMAPP of the present disclosure comprises: a) a first polypeptide comprising, in order from N-terminus to C-terminus: i) a peptide antigen (an “epitope”) that is recognized (e.g., is capable of being recognized and bound) by a TCR; ii) an MHC Class II β1 polypeptide; iii) an MHC Class II β2 polypeptide; and iv) an immunomodulatory polypeptide; and b) a second polypeptide comprising, in order from N-terminus to C-terminus: i) an MHC Class II α1 polypeptide; ii) an MHC Class II α2 polypeptide; and iii) an Ig Fc polypeptide. In some cases, a TMAPP of the present disclosure comprises: a) a first polypeptide comprising, in order from N-terminus to C-terminus: i) a peptide antigen (an “epitope”) that is recognized (e.g., is capable of being recognized and bound) by a TCR; ii) an MHC Class II β1 polypeptide; iii) an MHC Class II 2 polypeptide; iv) an immunomodulatory polypeptide; and v) a first member of a dimerizer pair; and b) a second polypeptide comprising, in order from N-terminus to C-terminus: i) an MHC Class II α1 polypeptide; ii) an MHC Class II α2 polypeptide; and iii) a second member of the dimerizer pair. In some cases, a TMAPP of the present disclosure comprises: a) a first polypeptide comprising, in order from N-terminus to C-terminus: i) a peptide antigen (an “epitope”) that is recognized (e.g., is capable of being recognized and bound) by a TCR; ii) an MHC Class II β1 polypeptide; iii) an MHC Class II β2 polypeptide; iv) an immunomodulatory polypeptide; and v) a first leucine zipper polypeptide; and b) a second polypeptide comprising, in order from N-terminus to C-terminus: i) an MHC Class II α1 polypeptide; ii) an MHC Class II α2 polypeptide; and iii) a second leucine zipper polypeptide. In any one of the above embodiments, the TMAPP can include a single immunomodulatory polypeptide. In any one of the above embodiments, the TMAPP can include 2 copies of the immunomodulatory polypeptide; the 2 copies can be in tandem, or can be separated by a linker. In any one of the above embodiments, the TMAPP can include 3 copies of the immunomodulatory polypeptide; the 3 copies can be in tandem, or can be separated by a linker. In some cases, the TMAPP comprises a linker (an “L1”) between the MHC polypeptide and the Ig Fc polypeptide; where exemplary suitable linkers include (GGGGS)n (SEQ ID NO: 1), where n is 1, 2, 3, 4, 5, 6, 7, or 8. In some cases, the TMAPP comprises a linker (an “L2”) between the immunomodulatory polypeptide and the MHC polypeptide, where exemplary suitable linkers include (GGGGS)n (SEQ ID NO: 1), where n is 1, 2, 3, 4, 5, 6, 7, or 8. In some cases, where the TMAPP comprises two immunomodulatory polypeptides, in some cases, the two immunomodulatory polypeptides are separated by a linker (an “L3); where exemplary suitable linkers include (GGGGS)n (SEQ ID NO: 1), where n is 1, 2, 3, 4, 5, 6, 7, or 8. In some cases, the linker between any two components of the TMAPP comprises the amino acid sequence GGSAAAGG (SEQ ID NO: 2). In any of the above embodiments, in some cases, the Ig Fc is an IgG1 Fc polypeptide. In any of the above embodiments, in some cases, the Ig Fc is an IgG1 Fc polypeptide. In any of the above embodiments, in some cases, the Ig Fc is an IgG4 Fc polypeptide. In any of the above embodiments, in some cases, the immunomodulatory polypeptide is a PD-L1 polypeptide. In any of the above embodiments, in some cases, the immunomodulatory polypeptide is a TGF-β polypeptide. In any of the above embodiments, in some cases, the immunomodulatory polypeptide is a FasL polypeptide. In some cases, the epitope is an auto-epitope (an epitope of a self antigen). In some cases, the epitope is a T1D-associated self epitope. For example, some cases, the peptide epitope is a proinsulin peptide. In some cases, the epitope is a celiac disease-associated self epitope.

[0099] In some cases, a TMAPP of the present disclosure comprises: a) a first polypeptide comprising, in order from N-terminus to C-terminus: i) a peptide antigen (an “epitope”) that is recognized (e.g., is capable of being recognized and bound) by a TCR; ii) an MHC Class II β1 polypeptide; and iii) an MHC Class II β2 polypeptide; and b) a second polypeptide comprising, in order from N-terminus to C-terminus: i) an immunomodulatory polypeptide; ii) an MHC Class II α1 polypeptide; and iii) an MHC Class II α2 polypeptide. In some cases, a TMAPP of the present disclosure comprises: a) a first polypeptide comprising, in order from N-terminus to C-terminus: i) a peptide antigen (an “epitope”) that is recognized (e.g., is capable of being recognized and bound) by a TCR; ii) an MHC Class II β1 polypeptide; and iii) an MHC Class II β2 polypeptide; and b) a second polypeptide comprising, in order from N-terminus to C-terminus: i) an immunomodulatory polypeptide; ii) an MHC Class II α1 polypeptide; iii) an MHC Class II α2 polypeptide; and iv) an immunoglobulin or non-immunoglobulin scaffold polypeptide. In some cases, a TMAPP of the present disclosure comprises: a) a first polypeptide comprising, in order from N-terminus to C-terminus: i) a peptide antigen (an “epitope”) that is recognized (e.g., is capable of being recognized and bound) by a TCR; ii) an MHC Class II β1 polypeptide; and iii) an MHC Class II β2 polypeptide; and b) a second polypeptide comprising, in order from N-terminus to C-terminus: i) an immunomodulatory polypeptide; ii) an MHC Class II α1 polypeptide; iii) an MHC Class II α2 polypeptide; and iv) an Ig Fc polypeptide. In some cases, a TMAPP of the present disclosure comprises: a) a first polypeptide comprising, in order from N-terminus to C-terminus: i) a peptide antigen (an “epitope”) that is recognized (e.g., is capable of being recognized and bound) by a TCR; ii) an MHC Class II β1 polypeptide; iii) an MHC Class II β2 polypeptide; and iv) a first member of a dimerizer pair; and b) a second polypeptide comprising, in order from N-terminus to C-terminus: i) an immunomodulatory polypeptide; ii) an MHC Class II α1 polypeptide; iii) an MHC Class II α2 polypeptide; and iv) a second member of the dimerizer pair. In some cases, a TMAPP of the present disclosure comprises: a) a first polypeptide comprising, in order from N-terminus to C-terminus: i) a peptide antigen (an “epitope”) that is recognized (e.g., is capable of being recognized and bound) by a TCR; ii) an MHC Class II β1 polypeptide; iii) an MHC Class II β2 polypeptide; and iv) a first leucine zipper polypeptide; and b) a second polypeptide comprising, in order from N-terminus to C-terminus: i) an immunomodulatory polypeptide; ii) an MHC Class II α1 polypeptide; iii) an MHC Class II α2 polypeptide; and iv) a second leucine zipper polypeptide. In any one of the above embodiments, the TMAPP can include a single immunomodulatory polypeptide. In any one of the above embodiments, the TMAPP can include 2 copies of the immunomodulatory polypeptide; the 2 copies can be in tandem, or can be separated by a linker. In any one of the above embodiments, the TMAPP can include 3 copies of the immunomodulatory polypeptide; the 3 copies can be in tandem, or can be separated by a linker. In some cases, the TMAPP comprises a linker (an “L1”) between the MHC polypeptide and the Ig Fc polypeptide; where exemplary suitable linkers include (GGGGS)n (SEQ ID NO: 1), where n is 1, 2, 3, 4, 5, 6, 7, or 8. In some cases, the TMAPP comprises a linker (an “L2”) between the immunomodulatory polypeptide and the MHC polypeptide, where exemplary suitable linkers include (GGGGS)n (SEQ ID NO: 1), where n is 1, 2, 3, 4, 5, 6, 7, or 8. In some cases, where the TMAPP comprises two immunomodulatory polypeptides, in some cases, the two immunomodulatory polypeptides are separated by a linker (an “L3); where exemplary suitable linkers include (GGGGS)n (SEQ ID NO: 1), where n is 1, 2, 3, 4, 5, 6, 7, or 8. In some cases, the linker between any two components of the TMAPP comprises the amino acid sequence GGSAAAGG (SEQ ID NO: 2). In any of the above embodiments, in some cases, the Ig Fc is an IgG1 Fc polypeptide. In any of the above embodiments, in some cases, the Ig Fc is an IgG4 Fc polypeptide. In any of the above embodiments, in some cases, the immunomodulatory polypeptide is a PD-L1 polypeptide. In any of the above embodiments, in some cases, the immunomodulatory polypeptide is a TGF-β polypeptide. In any of the above embodiments, in some cases, the immunomodulatory polypeptide is a FasL polypeptide. In some cases, the epitope is an auto-epitope (an epitope of a self antigen). In some cases, the epitope is a T1D-associated self epitope. For example, some cases, the peptide epitope is a proinsulin peptide. In some cases, the epitope is a celiac disease-associated self epitope.

[0100] In some cases, a TMAPP of the present disclosure comprises: a) a first polypeptide comprising, in order from N-terminus to C-terminus: i) a peptide antigen (an “epitope”) that is recognized (e.g., is capable of being recognized and bound) by a TCR; ii) an MHC Class II 1 polypeptide; iii) an MHC Class II α1 polypeptide; and iv) an MHC Class II α2 polypeptide; and b) a second polypeptide comprising, in order from N-terminus to C-terminus: i) an immunomodulatory polypeptide; and ii) an MHC Class II β2 polypeptide. In some cases, a TMAPP of the present disclosure comprises: a) a first polypeptide comprising, in order from N-terminus to C-terminus: i) a peptide antigen (an “epitope”) that is recognized (e.g., is capable of being recognized and bound) by a TCR; ii) an MHC Class II β1 polypeptide; iii) an MHC Class II α1 polypeptide; iv) an MHC Class II α2 polypeptide; and v) an immunoglobulin or non-immunoglobulin scaffold polypeptide; and b) a second polypeptide comprising, in order from N-terminus to C-terminus: i) an immunomodulatory polypeptide; and ii) an MHC Class II β2 polypeptide. In some cases, a TMAPP of the present disclosure comprises: a) a first polypeptide comprising, in order from N-terminus to C-terminus: i) a peptide antigen (an “epitope”) that is recognized (e.g., is capable of being recognized and bound) by a TCR; ii) an MHC Class II β1 polypeptide; iii) an MHC Class II α1 polypeptide; iv) an MHC Class II α2 polypeptide; and v) an Ig Fc polypeptide; and b) a second polypeptide comprising, in order from N-terminus to C-terminus: i) an immunomodulatory polypeptide; and ii) an MHC Class II β2 polypeptide. In some cases, a TMAPP of the present disclosure comprises: a) a first polypeptide comprising, in order from N-terminus to C-terminus: i) a peptide antigen (an “epitope”) that is recognized (e.g., is capable of being recognized and bound) by a TCR; ii) an MHC Class II β1 polypeptide; iii) an MHC Class II α1 polypeptide; iv) an MHC Class II α2 polypeptide; and v) a first member of a dimerizer pair; and b) a second polypeptide comprising, in order from N-terminus to C-terminus: i) an immunomodulatory polypeptide; ii) an MHC Class II β2 polypeptide; and iii) a second member of the dimerizer pair. In some cases, a TMAPP of the present disclosure comprises: a) a first polypeptide comprising, in order from N-terminus to C-terminus: i) a peptide antigen (an “epitope”) that is recognized (e.g., is capable of being recognized and bound) by a TCR; ii) an MHC Class II β1 polypeptide; iii) an MHC Class II α1 polypeptide; iv) an MHC Class II α2 polypeptide; and v) a first leucine zipper polypeptide; and b) a second polypeptide comprising, in order from N-terminus to C-terminus: i) an immunomodulatory polypeptide; ii) an MHC Class II β2 polypeptide; and iii) a second leucine zipper polypeptide. In any one of the above embodiments, the TMAPP can include a single immunomodulatory polypeptide. In any one of the above embodiments, the TMAPP can include 2 copies of the immunomodulatory polypeptide; the 2 copies can be in tandem, or can be separated by a linker. In any one of the above embodiments, the TMAPP can include 3 copies of the immunomodulatory polypeptide; the 3 copies can be in tandem, or can be separated by a linker. In some cases, the TMAPP comprises a linker (an “L1”) between the MHC polypeptide and the Ig Fc polypeptide; where exemplary suitable linkers include (GGGGS)n (SEQ ID NO: 1), where n is 1, 2, 3, 4, 5, 6, 7, or 8. In some cases, the TMAPP comprises a linker (an “L2”) between the immunomodulatory polypeptide and the MHC polypeptide, where exemplary suitable linkers include (GGGGS)n (SEQ ID NO: 1), where n is 1, 2, 3, 4, 5, 6, 7, or 8. In some cases, where the TMAPP comprises two immunomodulatory polypeptides, in some cases, the two immunomodulatory polypeptides are separated by a linker (an “L3); where exemplary suitable linkers include (GGGGS)n (SEQ ID NO: 1), where n is 1, 2, 3, 4, 5, 6, 7, or 8. In some cases, the linker between any two components of the TMAPP comprises the amino acid sequence GGSAAAGG (SEQ ID NO: 2). In any of the above embodiments, in some cases, the Ig Fc is an IgG1 Fc polypeptide. In any of the above embodiments, in some cases, the Ig Fc is an IgG4 Fc polypeptide. In any of the above embodiments, in some cases, the immunomodulatory polypeptide is a PD-L1 polypeptide. In any of the above embodiments, in some cases, the immunomodulatory polypeptide is a TGF-β polypeptide. In any of the above embodiments, in some cases, the immunomodulatory polypeptide is a FasL polypeptide. In some cases, the epitope is an auto-epitope (an epitope of a self antigen). In some cases, the epitope is a T1D-associated self epitope. For example, some cases, the peptide epitope is a proinsulin peptide. In some cases, the epitope is a celiac disease-associated self epitope.

### Single-Chain T-Cell Modulatory Antigen-Presenting Polypeptides

[0101] As noted above, in some cases, a TMAPP of the present disclosure is a single-chain (a single polypeptide chain) TMAPP. A single-chain TMAPP of the present disclosure comprises: i) a peptide antigen (an “epitope”) that is recognized (e.g., is capable of being recognized and bound) by a TCR; ii) an MHC Class II β1 polypeptide; iii) an MHC Class II β2 polypeptide; iv) an MHC Class II α1 polypeptide; v) an MHC Class II α2 polypeptide; and vi) at least one immunomodulatory polypeptide. A single-chain TMAPP of the present disclosure can also include an Ig Fc polypeptide. A single-chain TMAPP of the present disclosure can comprise two or more immunomodulatory polypeptides, where the two or more immunomodulatory polypeptides can have the same amino acid sequence or different amino acid sequences. The arrangement of the components, including the placement of the immunomodulatory polypeptide, of a single-chain TMAPP of the present disclosure can vary. Non-limiting examples are depicted in FIG. 4A-4C. For example, in some cases, a single-chain TMAPP of the present disclosure can comprise, in order from N-terminus to C-terminus: i) a peptide antigen (an “epitope”) that is recognized (e.g., is capable of being recognized and bound) by a TCR; ii) an MHC Class II α1 polypeptide; iii) an MHC Class II α2 polypeptide; iv) an MHC Class II 1 polypeptide; v) an MHC Class II β2 polypeptide; and vi) an Ig Fc polypeptide, where the immunomodulatory polypeptide of the single-chain TMAPP is located at one or more of: i) at the N-terminus (N-terminal to the peptide antigen); ii) between the peptide antigen (“epitope”) and the MHC Class II α1 polypeptide; iii) between the MHC Class II α2 polypeptide and the MHC Class II β1 polypeptide; iv) between the MHC Class II β2 polypeptide and the Ig Fc polypeptide; and v) C-terminal to the Ig Fc polypeptide. Such arrangements are depicted schematically in FIG. 4A. As another example, in some cases, a single-chain TMAPP of the present disclosure can comprise, in order from N-terminus to C-terminus: i) a peptide antigen (an “epitope”) that is recognized (e.g., is capable of being recognized and bound) by a TCR; ii) an MHC Class II β1 polypeptide; iii) an MHC Class II β2 polypeptide; iv) an MHC Class II α1 polypeptide; v) an MHC Class II α2 polypeptide; and vi) an Ig Fc polypeptide, where the immunomodulatory polypeptide of the single-chain TMAPP is located at one or more of: i) at the N-terminus (N-terminal to the peptide antigen); ii) between the peptide antigen (“epitope”) and the MHC Class II β1 polypeptide; iii) between the MHC Class II β2 polypeptide and the MHC Class II α1 polypeptide; iv) between the MHC Class II α2 polypeptide and the Ig Fc polypeptide; and v) C-terminal to the Ig Fc polypeptide. Such arrangements are depicted schematically in FIG. 4B. As another example, in some cases, a single-chain TMAPP of the present disclosure can comprise, in order from N-terminus to C-terminus: i) a peptide antigen (an “epitope”) that is recognized (e.g., is capable of being recognized and bound) by a TCR; ii) an MHC Class II β1 polypeptide; iii) an MHC Class II α1 polypeptide; iv) an MHC Class II α2 polypeptide; v) an MHC Class II 2 polypeptide; and vi) an Ig Fc polypeptide, where the immunomodulatory polypeptide of the single-chain TMAPP is located at one or more of: i) at the N-terminus (N-terminal to the peptide antigen); ii) between the peptide antigen (“epitope”) and the MHC Class II β1 polypeptide; iii) between the MHC Class II α1 polypeptide and the MHC Class II α2 polypeptide; iv) between the MHC Class II β2 polypeptide and the Ig Fc polypeptide; and v) v) C-terminal to the Ig Fc polypeptide. Such arrangements are depicted schematically in FIG. 4C. In any one of the above embodiments, the TMAPP can include a single immunomodulatory polypeptide. In any one of the above embodiments, the TMAPP can include 2 copies of the immunomodulatory polypeptide; the 2 copies can be in tandem, or can be separated by a linker. In any one of the above embodiments, the TMAPP can include 3 copies of the immunomodulatory polypeptide; the 3 copies can be in tandem, or can be separated by a linker. In some cases, the TMAPP comprises a linker (an “L1”) between the MHC polypeptide and the Ig Fc polypeptide; where exemplary suitable linkers include (GGGGS)n (SEQ ID NO: 1), where n is 1, 2, 3, 4, 5, 6, 7, or 8. In some cases, the TMAPP comprises a linker (an “L2”) between the immunomodulatory polypeptide and the MHC polypeptide, where exemplary suitable linkers include (GGGGS)n (SEQ ID NO: 1), where n is 1, 2, 3, 4, 5, 6, 7, or 8. In some cases, where the TMAPP comprises two immunomodulatory polypeptides, in some cases, the two immunomodulatory polypeptides are separated by a linker (an “L3); where exemplary suitable linkers include (GGGGS)n (SEQ ID NO: 1), where n is 1, 2, 3, 4, 5, 6, 7, or 8. In some cases, the linker between any two components of the TMAPP comprises the amino acid sequence GGSAAAGG (SEQ ID NO: 2). In some cases, the linker between any two components of the TMAPP comprises the amino acid sequence GGSAAAGG (SEQ ID NO:2). In any of the above embodiments, in some cases, the Ig Fc is an IgG1 Fc polypeptide. In any of the above embodiments, in some cases, the Ig Fc is an IgG4 Fc polypeptide. In any of the above embodiments, in some cases, the immunomodulatory polypeptide is a PD-L1 polypeptide. In any of the above embodiments, in some cases, the immunomodulatory polypeptide is a TGF-β polypeptide. In any of the above embodiments, in some cases, the immunomodulatory polypeptide is a FasL polypeptide. In some cases, the epitope is an auto-epitope (an epitope of a self antigen); for example, in some cases, the peptide epitope is a proinsulin peptide.

### Class II MHC Polypeptides

[0102] As noted above, a TMAPP of the present disclosure comprises Class II MHC polypeptides.

[0103] Naturally occurring Class II MHC polypeptides comprise an α chain and a β chain. “Class II MHC polypeptides” include human leukocyte antigen (HLA) α- and β-chains. MHC Class II polypeptides include MCH Class II DP α and β polypeptides, DM α and β polypeptides, DOA α and β polypeptides, DOB α and β polypeptides, DQ α and β polypeptides, and DR a and 3 polypeptides. As used herein, a “Class II MHC polypeptide” can comprise a class II MHC a chain polypeptide, a class II MHC β chain polypeptide, or only a portion of a class II MHC a or β chain polypeptide. For example, a “Class II MHC polypeptide” can be a polypeptide that includes: i) only the α1 domain of a class II MHC α chain polypeptide; ii) only the α2 domain of a class II MHC α chain; iii) only the α1 domain and an α2 domain of a class II MHC α chain; iv) only the β1 domain of a class II MHC β chain; v) only the β2 domain of a class II MHC β chain; vi) only the β1 domain and the β2 domain of a class II MHC β chain; vii) the α1 domain of a class II MHC α chain, the β1 domain of a class II MHC β chain, and the β2 domain of a class II MHC; and the like.

[0104] Class II MHC polypeptides include allelic forms. The HLA locus is highly polymorphic in nature. As disclosed in the Nomenclature for Factors of the HLA System 2000 (Hum. Immunol.; 62(4):419-68, 2001) there are 221 HLA-DRB 1 alleles, 19 DRB3 alleles, 89 DRB4 alleles, 14 DRB5 alleles, 19 DQA1 alleles and 39 DQB1 alleles, with new alleles being discovered continuously. A 2007 update by the WHO nomenclature Committee for Factors of the HLA System (www.anthonynolan.com/HIG/) showed there are 3 DRA alleles, 494 DRB 1 alleles, 1 DRB2 alleles, 44 DRB3 alleles, 13 DRB4 alleles, 18 DRB5 alleles, 3 DRB6 alleles, 2 DRB7 alleles, 10 DRB8 alleles, 1 DRB9 alleles, 34 DQA1 alleles, 83 DQB1 alleles, 23 DPA1, 126 DPB1 alleles, 4 DMA alleles, 7 DMB alleles, 12 DOA alleles and 9 DOB alleles. As used herein, the term “Class II MHC polypeptide” includes allelic forms of any known Class II MHC polypeptide.

[0105] In some cases, a TMAPP of the present disclosure comprises a Class II MHC α chain, without the leader, transmembrane, and intracellular portions (e.g., cytoplasmic tails) that may be present in a naturally-occurring Class II MHC α chain. Thus, in some cases, a TMAPP of the present disclosure comprises only the α1 and α2 portions of a Class II MHC α chain; and does not include the leader, transmembrane, and intracellular portions (e.g., cytoplasmic tails) that may be present in a naturally-occurring Class II MHC α chain.

[0106] In some cases, a TMAPP of the present disclosure comprises a Class II MHC β chain, without the leader, transmembrane, and intracellular portions (e.g., cytoplasmic tails) that may be present in a naturally-occurring Class II MHC β chain. Thus, in some cases, a TMAPP of the present disclosure comprises only the β1 and β2 portions of a Class II MHC β chain; and does not include the leader, transmembrane, and intracellular portions (e.g., cytoplasmic tails) that may be present in a naturally-occurring Class II MHC β chain.

### MHC Class II Alpha Chains

[0107] MHC Class II alpha chains comprise an α1 domain and an α2 domain. In some cases, the α1 domain and the α2 domain present in an antigen-presenting cell are from the same MHC Class II α chain polypeptide. In some cases, the α1 domain and the α2 domain present in an antigen-presenting cell are from two different MHC Class II α chain polypeptides.

[0108] MHC Class II alpha chains suitable for inclusion in a TMAPP (e.g., a multimeric TMAPP; a single-chain TMAPP) of the present disclosure lack a signal peptide. An MHC Class II alpha chain suitable for inclusion in a multimeric polypeptide of the present disclosure can have a length of from about 60 amino acids to about 190 amino acids; for example, an MHC Class II alpha chain suitable for inclusion in a TMAPP of the present disclosure can have a length of from about 60 amino acids to about 80 amino acids, from about 80 amino acids to about 100 amino acids, from about 100 amino acids to about 120 amino acids, from about 120 amino acids to about 140 amino acids, from about 140 amino acids to about 160 amino acids, from about 160 amino acids to about 180 amino acids, or from about 180 amino acids to about 200 amino acids. An MHC Class II α1 domain suitable for inclusion in a TMAPP of the present disclosure can have a length of from about 30 amino acids to about 95 amino acids; for example, an MHC Class II α1 domain suitable for inclusion in a TMAPP of the present disclosure can have a length of from about 30 amino acids to about 40 amino acids, from about 40 amino acids to about 50 amino acids, from about 50 amino acids to about 60 amino acids, from about 60 amino acids to about 70 amino acids, from about 70 amino acids to about 80 amino acids, from about 80 amino acids to about 90 amino acids, or from about 90 amino acids to about 95 amino acids. An MHC Class II α2 domain suitable for inclusion in a TMAPP of the present disclosure can have a length of from about 30 amino acids to about 95 amino acids; for example, an MHC Class II α2 domain suitable for inclusion in a TMAPP of the present disclosure can have a length of from about 30 amino acids to about 40 amino acids, from about 40 amino acids to about 50 amino acids, from about 50 amino acids to about 60 amino acids, from about 60 amino acids to about 70 amino acids, from about 70 amino acids to about 80 amino acids, from about 80 amino acids to about 90 amino acids, or from about 90 amino acids to about 95 amino acids.

### DRA

[0109] In some cases, a suitable MHC Class II α chain polypeptide is a DRA polypeptide. A DRA polypeptide can have at least 60%, at least 70%, at least 80%, at least 90%, at least 95%, at least 98%, at least 99%, or 100%, amino acid sequence identity with amino acids 26-203 of the DRA amino acid sequence depicted in FIG. 6. In some cases, the DRA polypeptide has a length of about 178 amino acids (e.g., 175, 176, 177, 178, 179, or 180 amino acids).

[0110] A “DRA polypeptide” includes allelic variants, e.g., naturally occurring allelic variants. Thus, in some cases, a suitable DRA polypeptide comprises the following amino acid sequence: IKEEH VIIQAEFYLN PDQSGEFMFD FDGDEIFHVD MAKKETVWRL EEFGRFASFE AQGALANIAV DKANLEIMTK RSNYTPITNV PPEVTVLTNSPVELREPNVL ICFIDKFTPP VVNVTWLRNG KPVTTGVSET VFLPREDHLF RKFHYLPFLPSTEDVYDCRV EHWGLDEPLL KHW (SEQ ID NO: 5, amino acids 26-203 of DRA*01:02:01, see FIG. 6), or an allelic variant thereof. In some cases, the allelic variant is the DRA*01:01:01:01 allelic variant that differs from DRA*01:02:01 by having a valine in place of the leucine at position 242 of the sequence in FIG. 6.

[0111] A suitable DRA α1 domain comprises an amino acid sequence having at least 60%, at least 70%, at least 80%, at least 90%, at least 95%, at least 98%, at least 99%, or 100%, amino acid sequence identity to the following amino acid sequence: VIIQAEFYLN PDQSGEFMFD FDGDEIFHVD MAKKETVWRL EEFGRFASFE AQGALANIAV DKANLEIMTK RSNYTPITN (SEQ ID NO: 6); and can have a length of about 84 amino acids (e.g., 80, 81, 82, 83, 84, 85, or 86 amino acids). A suitable DRA α1 domain can comprise the following amino acid sequence: VIIQAEFYLN PDQSGEFMFD FDGDEIFHVD MAKKETVWRL EEFGRFASFE AQGALANIAV DKANLEIMTK RSNYTPITN (SEQ ID NO: 6), or a naturally-occurring allelic variant.

[0112] A suitable DRA α2 domain comprises an amino acid sequence having at least 60%, at least 70%, at least 80%, at least 90%, at least 95%, at least 98%, at least 99%, or 100%, amino acid sequence identity to the following amino acid sequence: V PPEVTVLTNSPVELREPNVL ICFIDKFTPP VVNVTWLRNG KPVTTGVSET VFLPREDHLF RKFHYLPFLPSTEDVYDCRV EHWGLDEPLL KHW (SEQ ID NO: 7); and can have a length of about 94 amino acids (e.g., 90, 91, 92, 93, 94, 95, 96, 97, or 98 amino acids).

### DMA

[0113] In some cases, a suitable MHC Class II α chain polypeptide is a DMA polypeptide. A DMA polypeptide can have at least 60%, at least 70%, at least 80%, at least 90%, at least 95%, at least 98%, at least 99%, or 100%, amino acid sequence identity with amino acids 27-217 of the DMA amino acid sequence depicted in FIG. 11. In some cases, the DMA polypeptide has a length of about 191 amino acids (e.g., 188, 189, 190, 191, 192, or 193 amino acids).

[0114] A “DMAA polypeptide” includes allelic variants, e.g., naturally occurring allelic variants. Thus, in some cases, a suitable DMAA polypeptide comprises the following amino acid sequence: VPEA PTPMWPDDLQ NHTFLHTVYC QDGSPSVGLS EAYDEDQLFF FDFSQNTRVP RLPEFADWAQ EQGDAPAILF DKEFCEWMIQ QIGPKLDGKI PVSRGFPIAE VFTLKPLEFG KPNTLVCFVS NLFPPMLTVN WQHHSVPVEG FGPTFVSAVD GLSFQAFSYL NFTPEPSDIF SCIVTHEIDR YTAIAYW (SEQ ID NO: 8 amino acids 27-217 of DMA*01:01:01, see FIG. 11), or an allelic variant thereof.

[0115] A suitable DMA α1 domain comprises an amino acid sequence having at least 60%, at least 70%, at least 80%, at least 90%, at least 95%, at least 98%, at least 99%, or 100%, amino acid sequence identity to the following amino acid sequence: VPEA PTPMWPDDLQ NHTFLHTVYC QDGSPSVGLS EAYDEDQLFF FDFSQNTRVP RLPEFADWAQ EQGDAPAILF DKEFCEWMIQ QIGPKLDGKI PVSR (SEQ ID NO: 9); and can have a length of about 98 amino acids (e.g., 94, 95, 96, 97, 98, 99, 100, or 101 amino acids). A suitable DMA α1 domain can comprise the following amino acid sequence: VPEA PTPMWPDDLQ NHTFLHTVYC QDGSPSVGLS EAYDEDQLFF FDFSQNTRVP RLPEFADWAQ EQGDAPAILF DKEFCEWMIQ QIGPKLDGKI PVSR (SEQ ID NO: 9), or a naturally-occurring allelic variant thereof.

[0116] A suitable DMA α2 domain comprises an amino acid sequence having at least 60%, at least 70%, at least 80%, at least 90%, at least 95%, at least 98%, at least 99%, or 100%, amino acid sequence identity to the following amino acid sequence: GFPIAE VFTLKPLEFG KPNTLVCFVS NLFPPMLTVN WQHHSVPVEG FGPTFVSAVD GLSFQAFSYL NFTPEPSDIF SCIVTHEIDR YTAIAYW (SEQ ID NO: 10); and can have a length of about 93 amino acids (e.g., 90, 91, 92, 93, 94, 95, 96, or 97 amino acids). A suitable DMA α2 domain can comprise the following amino acid sequence: GFPIAE VFTLKPLEFG KPNTLVCFVS NLFPPMLTVN WQHHSVPVEG FGPTFVSAVD GLSFQAFSYL NFTPEPSDIF SCIVTHEIDR YTAIAYW (SEQ ID NO: 10), or a naturally-occurring allelic variant thereof.

### DOA

[0117] In some cases, a suitable MHC Class II α chain polypeptide is a DOA polypeptide. A DOA polypeptide can have at least 60%, at least 70%, at least 80%, at least 90%, at least 95%, at least 98%, at least 99%, or 100%, amino acid sequence identity with amino acids 26-204 of the DOA amino acid sequence depicted in FIG. 13. In some cases, the DOA polypeptide has a length of about 179 amino acids (e.g., 175, 176, 177, 178, 179, 180, 181, or 182 amino acids).

[0118] A “DOA polypeptide” includes allelic variants, e.g., naturally occurring allelic variants. Thus, in some cases, a suitable DOA polypeptide comprises the following amino acid sequence: TKADH MGSYGPAFYQ SYGASGQFTH EFDEEQLFSV DLKKSEAVWR LPEFGDFARF DPQGGLAGIA AIKAHLDILV ERSNRSRAIN VPPRVTVLPK SRVELGQPNI LICIVDNIFP PVINITWLRN GQTVTEGVAQ TSFYSQPDHL FRKFHYLPFV PSAEDVYDCQ VEHWGLDAPL LRHW (SEQ ID NO: 11; amino acids 26-204 of DOA*01:01:01:01, see FIG. 13), or an allelic variant thereof. In some cases, the allelic variant may be the DOA*01:02 by having an arginine in place of the cysteine (R80C) at position 80 or the DOA*01:03 variant having a valine in place of the leucine at position 74 (L74V) relative to DOA*01:01:01:01.

[0119] A suitable DOA α1 domain comprises an amino acid sequence having at least 60%, at least 70%, at least 80%, at least 90%, at least 95%, at least 98%, at least 99%, or 100%, amino acid sequence identity to the following amino acid sequence: TKADH MGSYGPAFYQ SYGASGQFTH EFDEEQLFSV DLKKSEAVWR LPEFGDFARF DPQGGLAGIA AIKAHLDILV ERSNRSRAIN (SEQ ID NO: 12); and can have a length of about 85 amino acids (e.g., 83, 84, 85, 86, 87, or 88 amino acids). Suitable α1 domain sequence may incorporate the L74V and/or R80C substitutions found in DOA*01:02 and DOA*01:03 (the amino acids corresponding to L74 and R 80 are shown italicized and bolded). A suitable DOA α1 domain can comprise the following amino acid sequence: TKADH MGSYGPAFYQ SYGASGQFTH EFDEEQLFSV DLKKSEAVWR LPEFGDFARF DPQGGLAGIA AIKAHLDILV ERSNRSRAIN (SEQ ID NO: 12), or a naturally-occurring allelic variant.

[0120] A suitable DOA α2 domain comprises an amino acid sequence having at least 60%, at least 70%, at least 80%, at least 90%, at least 95%, at least 98%, at least 99%, or 100%, amino acid sequence identity to the following amino acid sequence: VPPRVTVLPK SRVELGQPNI LICIVDNIFP PVINITWLRN GQTVTEGVAQ TSFYSQPDHL FRKFHYLPFV PSAEDVYDCQ VEHWGLDAPL LRHW (SEQ ID NO: 13); and can have a length of about 94 amino acids (e.g., 91, 92, 93, 94, 95, 96, or 97 amino acids). A suitable DOA α2 domain can comprise the following amino acid sequence: VPPRVTVLPK SRVELGQPNI LICIVDNIFP PVINITWLRN GQTVTEGVAQ TSFYSQPDHL FRKFHYLPFV PSAEDVYDCQ VEHWGLDAPL LRHW (SEQ ID NO: 13), or a naturally-occurring allelic variant thereof.

### DPA1

[0121] In some cases, a suitable MHC Class II α chain polypeptide is a DPA1 polypeptide. A DPA1 polypeptide can have at least 60%, at least 70%, at least 80%, at least 90%, at least 95%, at least 98%, at least 99%, or 100%, amino acid sequence identity with amino acids 29-209 of the DPA1 amino acid sequence depicted in FIG. 15. In some cases, the DPA1 polypeptide has a length of about 181 amino acids (e.g., 178, 179, 180, 181, 182, 183, or 184 amino acids).

[0122] A “DPA1 polypeptide” includes allelic variants, e.g., naturally occurring allelic variants. Thus, in some cases, a suitable DPA1 polypeptide comprises the following amino acid sequence: AG AIKADHVSTY AAFVQTHRPT GEFMFEFDED EMFYVDLDKK ETVWHLEEFG QAFSFEAQGG LANIAILNNN LNTLIQRSNH TQATNDPPEV TVFPKEPVEL GQPNTLICHI DKFFPPVLNV TWLCNGELVT EGVAESLFLP RTDYSFHKFH YLTFVPSAED FYDCRVEHWG LDQPLLKHW (SEQ ID NO: 14, amino acids 29-209 of DPA1*01:03:01:01, see FIG. 15), or an allelic variant thereof.

[0123] A suitable DPA1 α1 domain may comprise an amino acid sequence having at least 60%, at least 70%, at least 80%, at least 90%, at least 95%, at least 98%, at least 99%, or 100%, amino acid sequence identity to the following amino acid sequence: AIKADHVSTY AAFVQTHRPT GEFMFEFDED EMFYVDLDKK ETVWHLEEFG QAFSFEAQGG LANIAILNNN LNTLIQRSNH TQATN (SEQ ID NO: 15); and can have a length of about 87 amino acids (e.g., 84, 85, 86, 87, 88, or 89 amino acids). A suitable DPA1 α1 domain can comprise the following amino acid sequence: AIKADHVSTY AAFVQTHRPT GEFMFEFDED EMFYVDLDKK ETVWHLEEFG QAFSFEAQGG LANIAILNNN LNTLIQRSNH TQATN (SEQ ID NO: 15), or a naturally-occurring allelic variant.

[0124] A suitable DPA1 α2 domain may comprise an amino acid sequence having at least 60%, at least 70%, at least 80%, at least 90%, at least 95%, at least 98%, at least 99%, or 100%, amino acid sequence identity to the following amino acid sequence: DPPEV TVFPKEPVEL GQPNTLICHI DKFFPPVLNV TWLCNGELVT EGVAESLFLP RTDYSFHKFH YLTFVPSAED FYDCRVEHWG LDQPLLKHW (SEQ ID NO: 16); and can have a length of about 97 amino acids (e.g., 91, 92, 93, 94, 95, 96, or 97 amino acids). A suitable DPA1 α2 domain can comprise the following amino acid sequence: DPPEV TVFPKEPVEL GQPNTLICHI DKFFPPVLNV TWLCNGELVT EGVAESLFLP RTDYSFHKFH YLTFVPSAED FYDCRVEHWG LDQPLLKHW (SEQ ID NO: 16), or a naturally-occurring allelic variant thereof.

[0125] Other DPA1 polypeptides comprise the sequence: MRPEDRMFHIRAVILRALSLAFLLSLRGAGAIKADHVSTYAAFVQTHRPTGEFMFEFDE DEQFYVDLDKKETVWHLEEFGRAFSFEAQGGLANIAILNNNLNTLIQRSNHTQAANDPP EVTVFPKEPVELGQPNTLICHIDRFFPPVLNVTWLCNGEPVTEGVAESLFLPRTDYSFHKF HYLTFVPSAEDVYDCRVEHWGLDQPLLKHWEAQEPIQMPETTETVLCALGLVLGLVGII VGTVLIIKSLRSGHDPRAQGPL (SEQ ID NO: 17; amino acids 29-209 of DPA1*02:01:01:01, see FIG. 15), or variant thereof having at least 60%, at least 70%, at least 80%, at least 90%, at least 95%, at least 98%, at least 99%, or 100%, amino acid sequence identity.

[0126] A suitable DPA1 α1 domain may comprise an amino acid sequence having at least 60%, at least 70%, at least 80%, at least 90%, at least 95%, at least 98%, at least 99%, or 100%, amino acid sequence identity to the amino acids 29-115 of DPA1*02:01:01:01, SEQ ID NO: 17; and can have a length of about 87 amino acids (e.g., 84, 85, 86, 87, 88, or 89 amino acids. A suitable DPA1 α2 domain may comprise an amino acid sequence having at least 60%, at least 70%, at least 80%, at least 90%, at least 95%, at least 98%, at least 99%, or 100%, amino acid sequence identity to amino acids 116 to 209 of DPA1*02:01:01:01, SEQ ID NO: 17; and can have a length of about 97 amino acids (e.g., 91, 92, 93, 94, 95, 96, or 97 amino acids).

### DQA1

[0127] In some cases, a suitable MHC Class II α chain polypeptide is a DQA1 polypeptide. A DQA1 polypeptide can have at least 60%, at least 70%, at least 80%, at least 90%, at least 95%, at least 98%, at least 99%, or 100%, amino acid sequence identity with amino acids 24-204 of any of the DQA1 amino acid sequences depicted in FIG. 17. In some cases, the DQA1 polypeptide has a length of about 181 amino acids (e.g., 177, 178, 179, 180, 181, 182, or 183 amino acids). In an embodiment, a DQA1 α chain polypeptide can have at least 60%, at least 70%, at least 80%, at least 90%, at least 95%, at least 98%, at least 99%, or 100%, amino acid sequence identity with amino acids 30-227 of the DQA1*01:01 α chain amino acid in FIG. 17, ImMunoGeneTics (“IMGT”)/HLA Acc No:HLA00601. In an embodiment, a DQA1 α chain polypeptide can have at least 60%, at least 70%, at least 80%, at least 90%, at least 95%, at least 98%, at least 99%, or 100%, amino acid sequence identity with amino acids 30-227 of the DQA1*01:02 α chain amino acid in FIG. 17, IMGT/HLA Acc No:HLA00603, GenBank NP_002113. In an embodiment, a DQA1 α chain polypeptide can have at least 60%, at least 70%, at least 80%, at least 90%, at least 95%, at least 98%, at least 99%, or 100%, amino acid sequence identity with amino acids 30-227 of the DQA1*02:01 α chain amino acid in FIG. 17, IMGT/HLA Acc No:HLA00607. In an embodiment, a DQA1 α chain polypeptide can have at least 60%, at least 70%, at least 80%, at least 90%, at least 95%, at least 98%, at least 99%, or 100%, amino acid sequence identity with amino acids 30-227 of the DQA1*03:01: α chain amino acid in FIG. 17, IMGT/HLA Acc No:HLA00609. In an embodiment, a DQA1 α chain polypeptide can have at least 60%, at least 70%, at least 80%, at least 90%, at least 95%, at least 98%, at least 99%, or 100%, amino acid sequence identity with amino acids 30-227 of the DQA1*04:01 α chain amino acid in FIG. 17, IMGT/HLA Acc No:HLA00612. In an embodiment, a DQA1 α chain polypeptide can have at least 60%, at least 70%, at least 80%, at least 90%, at least 95%, at least 98%, at least 99%, or 100%, amino acid sequence identity with amino acids 30-227 of the DQA1*05:01 α chain amino acid in FIG. 17, IMGT/HLA Acc No:HLA00613. In an embodiment, a DQA1 α chain polypeptide can have at least 60%, at least 70%, at least 80%, at least 90%, at least 95%, at least 98%, at least 99%, or 100%, amino acid sequence identity with amino acids 30-227 of the DQA1*06:01 α chain amino acid in FIG. 17, IMGT/HLA Acc No:HLA00620.

[0128] A “DQA1 polypeptide” includes allelic variants, e.g., naturally occurring allelic variants. Thus, in some cases, a suitable DQA1 polypeptide comprises the following amino acid sequence: EDIVADH VASCGVNLYQ FYGPSGQYTH EFDGDEQFYV DLERKETAWR WPEFSKFGGF DPQGALRNMA VAKHNLNIMI KRYNSTAATN EVPEVTVFSK SPVTLGQPNT LICLVDNIFP PVVNITWLSN GQSVTEGVSE TSFLSKSDHS FFKISYLTFL PSADEIYDCK VEHWGLDQPL LKHW (SEQ ID NO: 18), or an allelic variant thereof.

[0129] A suitable DQA1 α1 domain comprises an amino acid sequence having at least 60%, at least 70%, at least 80%, at least 90%, at least 95%, at least 98%, at least 99%, or 100%, amino acid sequence identity to the following amino acid sequence: EDIVADH VASCGVNLYQ FYGPSGQYTH EFDGDEQFYV DLERKETAWR WPEFSKFGGF DPQGALRNMA VAKHNLNIMI KRYNSTAATN (SEQ ID NO: 19); and can have a length of about 87 amino acids (e.g., 84, 85, 86, 87, 88, or 89 amino acids). A suitable DQA1 α1 domain can comprise the following amino acid sequence: EDIVADH VASCGVNLYQ FYGPSGQYTH EFDGDEQFYV DLERKETAWR WPEFSKFGGF DPQGALRNMA VAKHNLNIMI KRYNSTAATN (SEQ ID NO: 19), or a naturally-occurring allelic variant.

[0130] A suitable DQA1 α2 domain comprises an amino acid sequence having at least 60%, at least 70%, at least 80%, at least 90%, at least 95%, at least 98%, at least 99%, or 100%, amino acid sequence identity to the following amino acid sequence: EVPEVTVFSK SPVTLGQPNT LICLVDNIFP PVVNITWLSN GQSVTEGVSE TSFLSKSDHS FFKISYLTFL PSADEIYDCK VEHWGLDQPL LKHW (SEQ ID NO: 20); and can have a length of about 94 amino acids (e.g., 91, 92, 93, 94, 95, 96, or 97 amino acids). A suitable DQA1 α2 domain can comprise the following amino acid sequence: EVPEVTVFSK SPVTLGQPNT LICLVDNIFP PVVNITWLSN GQSVTEGVSE TSFLSKSDHS FFKISYLTFL PSADEIYDCK VEHWGLDQPL LKHW (SEQ ID NO: 20), or a naturally-occurring allelic variant thereof.

### DQA2

[0131] In some cases, a suitable MHC Class II α chain polypeptide is a DQA2 polypeptide. A DQA2 polypeptide can have at least 60%, at least 70%, at least 80%, at least 90%, at least 95%, at least 98%, at least 99%, or 100%, amino acid sequence identity with amino acids 24-204 of the DQA2 amino acid sequence depicted in FIG. 18. In some cases, the DQA2 polypeptide has a length of about 181 amino acids (e.g., 177, 178, 179, 180, 181, 182, or 183 amino acids).

[0132] A “DQA2 polypeptide” includes allelic variants, e.g., naturally occurring allelic variants. Thus, in some cases, a suitable DQA2 polypeptide comprises the following amino acid sequence: EDIVADH VASYGVNFYQ SHGPSGQYTH EFDGDEEFYV DLETKETVWQ LPMFSKFISF DPQSALRNMA VGKHTLEFMM RQSNSTAATN EVPEVTVFSK FPVTLGQPNT LICLVDNIFP PVVNITWLSN GHSVTEGVSE TSFLSKSDHS FFKISYLTFL PSADEIYDCK VEHWGLDEPL LKHW (SEQ ID NO: 21), or an allelic variant thereof.

[0133] A suitable DQA2 α1 domain comprises an amino acid sequence having at least 60%, at least 70%, at least 80%, at least 90%, at least 95%, at least 98%, at least 99%, or 100%, amino acid sequence identity to the following amino acid sequence: EDIVADH VASYGVNFYQ SHGPSGQYTH EFDGDEEFYV DLETKETVWQ LPMFSKFISF DPQSALRNMA VGKHTLEFMM RQSNSTAATN (SEQ ID NO: 22); and can have a length of about 87 amino acids (e.g., 84, 85, 86, 87, 88, or 89 amino acids). A suitable DQA2 α1 domain can comprise the following amino acid sequence: EDIVADH VASYGVNFYQ SHGPSGQYTH EFDGDEEFYV DLETKETVWQ LPMFSKFISF DPQSALRNMA VGKHTLEFMM RQSNSTAATN (SEQ ID NO: 22), or a naturally-occurring allelic variant.

[0134] A suitable DQA2 α2 domain comprises an amino acid sequence having at least 60%, at least 70%, at least 80%, at least 90%, at least 95%, at least 98%, at least 99%, or 100%, amino acid sequence identity to the following amino acid sequence: EVPEVTVFSK FPVTLGQPNT LICLVDNIFP PVVNITWLSN GHSVTEGVSE TSFLSKSDHS FFKISYLTFL PSADEIYDCK VEHWGLDEPL LKHW (SEQ ID NO: 23); and can have a length of about 94 amino acids (e.g., 91, 92, 93, 94, 95, 96, or 97 amino acids). A suitable DQA2 α2 domain can comprise the following amino acid sequence: EVPEVTVFSK FPVTLGQPNT LICLVDNIFP PVVNITWLSN GHSVTEGVSE TSFLSKSDHS FFKISYLTFL PSADEIYDCK VEHWGLDEPL LKHW (SEQ ID NO: 23), or a naturally-occurring allelic variant thereof.

MHC Class II beta chains

[0135] MHC Class II beta chains comprise a β1 domain and a β2 domain. In some cases, the β1 domain and the β2 domain present in an antigen-presenting cell are from the same MHC Class II β chain polypeptide. In some cases, the β1 domain and the β2 domain present in an antigen-presenting cell are from two different MHC Class II β chain polypeptides.

[0136] MHC Class II beta chains suitable for inclusion in a TMAPP (e.g., a multimeric TMAPP; a single-chain TMAPP) of the present disclosure lack a signal peptide. An MHC Class II beta chain suitable for inclusion in a TMAPP of the present disclosure can have a length of from about 60 amino acids to about 210 amino acids; for example, an MHC Class II beta chain suitable for inclusion in a TMAPP of the present disclosure can have a length of from about 60 amino acids to about 80 amino acids, from about 80 amino acids to about 100 amino acids, from about 100 amino acids to about 120 amino acids, from about 120 amino acids to about 140 amino acids, from about 140 amino acids to about 160 amino acids, from about 160 amino acids to about 180 amino acids, from about 180 amino acids to about 200 amino acids, or from about 200 amino acids to about 210 amino acids. An MHC Class II β1 domain suitable for inclusion in a TMAPP of the present disclosure can have a length of from about 30 amino acids to about 105 amino acids; for example, an MHC Class II β1 domain suitable for inclusion in a TMAPP of the present disclosure can have a length of from about 30 amino acids to about 40 amino acids, from about 40 amino acids to about 50 amino acids, from about 50 amino acids to about 60 amino acids, from about 60 amino acids to about 70 amino acids, from about 70 amino acids to about 80 amino acids, from about 80 amino acids to about 90 amino acids, from about 90 amino acids to about 95 amino acids, from about 95 amino acids to about 100 amino acids, or from about 100 amino acids to about 105 amino acids. An MHC Class II β2 domain suitable for inclusion in a TMAPP of the present disclosure can have a length of from about 30 amino acids to about 105 amino acids; for example, an MHC Class II β2 domain suitable for inclusion in a TMAPP of the present disclosure can have a length of from about 30 amino acids to about 40 amino acids, from about 40 amino acids to about 50 amino acids, from about 50 amino acids to about 60 amino acids, from about 60 amino acids to about 70 amino acids, from about 70 amino acids to about 80 amino acids, from about 80 amino acids to about 90 amino acids, from about 90 amino acids to about 95 amino acids, from about 95 amino acids to about 100 amino acids, or from about 100 amino acids to about 105 amino acids.

### DRB1

[0137] In some cases, a suitable MHC Class II β chain polypeptide is a DRB1 polypeptide. In an embodiment, a DRB1 polypeptide can have at least 60%, at least 70%, at least 80%, at least 90%, at least 95%, at least 98%, at least 99%, or 100%, amino acid sequence identity with amino acids 30-227 of any DRB1 amino acid sequence depicted in FIG. 7, which displays the DRB1 precursor proteins in which amino acids 1-29 are the signal sequence (underlined), 30-124 form the 01 region (bolded), 125-227 for the 32 region (bolded and underlined), and 228-250 the transmembrane region.

[0138] In an embodiment, a DRB1 β chain polypeptide can have at least 60%, at least 70%, at least 80%, at least 90%, at least 95%, at least 98%, at least 99%, or 100%, amino acid sequence identity with amino acids 30-227 of the DRB1-1 (DRB1*01:01) beta chain amino acid sequence Swiss-Prot/UniProt reference (“sp”) P04229.2 in FIG. 7. In an embodiment, a DRB1 β chain polypeptide can have at least 60%, at least 70%, at least 80%, at least 90%, at least 95%, at least 98%, at least 99%, or 100%, amino acid sequence identity with amino acids 30-227 of the DRB1-3 (DRB1*03:01) beta chain amino acid sequence sp P01912.2 in FIG. 7. In an embodiment, a DRB1 β chain polypeptide can have at least 60%, at least 70%, at least 80%, at least 90%, at least 95%, at least 98%, at least 99%, or 100%, amino acid sequence identity with amino acids 30-227 of the DRB1-4 (DRB1*04:01) beta chain amino acid sequence sp P13760.1 in FIG. 7. In an embodiment, a DRB1 β chain polypeptide can have at least 60%, at least 70%, at least 80%, at least 90%, at least 95%, at least 98%, at least 99%, or 100%, amino acid sequence identity with amino acids 30-227 of the DRB1-7 (DRB1*07:01) beta chain amino acid sequence sp P13761.1 in FIG. 7. In an embodiment, a DRB1 β chain polypeptide can have at least 60%, at least 70%, at least 80%, at least 90%, at least 95%, at least 98%, at least 99%, or 100%, amino acid sequence identity with amino acids 30-227 of the DRB1-8 (DRB1*08:01) beta chain amino acid sequence sp Q30134.2 in FIG. 7. In an embodiment, a DRB1 β chain polypeptide can have at least 60%, at least 70%, at least 80%, at least 90%, at least 95%, at least 98%, at least 99%, or 100%, amino acid sequence identity with amino acids 30-227 of the DRB1-9 (DRB1*09:01) beta chain amino acid sequence sp Q9TQE0.1 in FIG. 7. In an embodiment, a DRB1 β chain polypeptide can have at least 60%, at least 70%, at least 80%, at least 90%, at least 95%, at least 98%, at least 99%, or 100%, amino acid sequence identity with amino acids 30-227 of the DRB1-10 (DRB1*10:01) beta chain amino acid sequence sp Q30167.2 in FIG. 7. In an embodiment, a DRB1 β chain polypeptide can have at least 60%, at least 70%, at least 80%, at least 90%, at least 95%, at least 98%, at least 99%, or 100%, amino acid sequence identity with amino acids 30-227 of the DRB1-11 (DRB1*11:01) beta chain amino acid sequence sp P20039.1 in FIG. 7. In an embodiment, a DRB1 β chain polypeptide can have at least 60%, at least 70%, at least 80%, at least 90%, at least 95%, at least 98%, at least 99%, or 100%, amino acid sequence identity with amino acids 30-227 of the DRB1-12 (DRB1*12:01) beta chain amino acid sequence sp Q951E3.1 in FIG. 7. In an embodiment, a DRB1 β chain polypeptide can have at least 60%, at least 70%, at least 80%, at least 90%, at least 95%, at least 98%, at least 99%, or 100%, amino acid sequence identity with amino acids 30-227 of the DRB1-13 (DRB1*13:01) beta chain amino acid sequence sp Q5Y7A7.1 in FIG. 7. In an embodiment, a DRB1 β chain polypeptide can have at least 60%, at least 70%, at least 80%, at least 90%, at least 95%, at least 98%, at least 99%, or 100%, amino acid sequence identity with amino acids 30-227 of the DRB1-14 (DRB1*14:01) beta chain amino acid sequence sp Q9GIY3.1 in FIG. 7. In an embodiment, a DRB1 β chain polypeptide can have at least 60%, at least 70%, at least 80%, at least 90%, at least 95%, at least 98%, at least 99%, or 100%, amino acid sequence identity with amino acids 30-227 of the DRB1-15 (DRB1*15:01) beta chain amino acid sequence sp P01911 in FIG. 7. In an embodiment, a DRB1 β chain polypeptide can have at least 60%, at least 70%, at least 80%, at least 90%, at least 95%, at least 98%, at least 99%, or 100%, amino acid sequence identity with amino acids 30-227 of the DRB1-16 (DRB1*16:01) beta chain amino acid sequence sp Q29974.1 in FIG. 7. In some cases, the DRB1 β chain polypeptide has a length of about 198 amino acids (e.g., 195, 196, 197, 198, 199, 200, 201, or 202 amino acids).

[0139] A “DRB1 polypeptide” includes allelic variants, e.g., naturally occurring allelic variants. Thus, in some cases, a suitable DRB1 polypeptide comprises the following amino acid sequence: DTRPRFLEQVKHECHFFNGTERVRFLDRYFYHQEEYVRFDSDVGEYRAVTELGRPDAE YWNSQKDLLEQKRAAVDTYCRHNYGVGESFTVQRRVYPEVTVYPAKTQPLQHHNLLV CSVNGFYPGSIEVRWFRNGQEEKTGVVSTGLIQNGDWTFQTLVMLETVPRSGEVYTCQ VEHPSLTSPLTVEWRARSESAQSK (SEQ ID NO: 24) (amino acids 31-227 of DRB1-4, see FIG. 7A), or an allelic variant thereof.

[0140] A suitable DRB1 β1 domain comprises an amino acid sequence having at least 60%, at least 70%, at least 80%, at least 90%, at least 95%, at least 98%, at least 99%, or 100%, amino acid sequence identity to the following amino acid sequence: DTRPRFLEQVKHECHFFNGTERVRFLDRYFYHQEEYVRFDSDVGEYRAVTELGRPDAE YWNSQKDLLEQKRAAVDTYCRHNYGVGESFTVQRRV (SEQ ID NO: 25); and can have a length of about 95 amino acids (e.g., 92, 93, 94, 95, 96, 97, or 98 amino acids). A suitable DRB1 β1 domain can comprise the following amino acid sequence: DTRPRFLEQVKHECHFFNGTERVRFLDRYFYHQEEYVRFDSDVGEYRAVTELGRPDAE YWNSQKDLLEQKRAAVDTYCRHNYGVGESFTVQRRV (SEQ ID NO: 25), or a naturally-occurring allelic variant.

[0141] A suitable DRB1 β2 domain comprises an amino acid sequence having at least 60%, at least 70%, at least 80%, at least 90%, at least 95%, at least 98%, at least 99%, or 100%, amino acid sequence identity to the following amino acid sequence: YPEVTVYPAKTQPLQHHNLLVCSVNGFYPGSIEVRWFRNGQEEKTGVVSTGLIQNGDW TFQTLVMLETVPRSGEVYTCQVEHPSLTSPLTVEWRARSESAQSK (SEQ ID NO: 26); and can have a length of about 103 amino acids (e.g., 100, 101, 102, 103, 104, 105, or 106 amino acids). A suitable DRB1 β2 domain can comprise the following amino acid sequence: YPEVTVYPAKTQPLQHHNLLVCSVNGFYPGSIEVRWFRNGQEEKTGVVSTGLIQNGDW TFQTLVMLETVPRSGEVYTCQVEHPSLTSPLTVEWRARSESAQSK (SEQ ID NO: 26), or a naturally-occurring allelic variant thereof.

### DRB3

[0142] In some cases, a suitable MHC Class II β chain polypeptide is a DRB3 polypeptide. In an embodiment, a DRB3 polypeptide can have at least 60%, at least 70%, at least 80%, at least 90%, at least 95%, at least 98%, at least 99%, or 100%, amino acid sequence identity with amino acids 30-227 of any DRB3 amino acid sequence depicted in FIG. 8, which displays the DRB3 precursor proteins in which amino acids 1-29 are the signal sequence (underlined), 30-124 form the 01 region (shown bolded), 125-227 for the 32 region, and 228-250 the transmembrane region. In an embodiment, a DRB3 β chain polypeptide can have at least 60%, at least 70%, at least 80%, at least 90%, at least 95%, at least 98%, at least 99%, or 100%, amino acid sequence identity with amino acids 30-227 of the DRB1-3 (DRB3*01:01) beta chain amino acid sequence GenBank NP_072049.1 in FIG. 8. In an embodiment, a DRB3 β chain polypeptide can have at least 60%, at least 70%, at least 80%, at least 90%, at least 95%, at least 98%, at least 99%, or 100%, amino acid sequence identity with amino acids 30-227 of the DRB1-3 beta chain amino acid sequence in GenBank accession EAX03632.1 in FIG. 8. In an embodiment, a DRB3 β chain polypeptide can have at least 60%, at least 70%, at least 80%, at least 90%, at least 95%, at least 98%, at least 99%, or 100%, amino acid sequence identity with amino acids 30-227 of the DRB1-3 (DRB3*02:01) beta chain amino acid sequence GenBank CAA23781.1 in FIG. 8. In an embodiment, a DRB3 β chain polypeptide can have at least 60%, at least 70%, at least 80%, at least 90%, at least 95%, at least 98%, at least 99%, or 100%, amino acid sequence identity with amino acids 30-227 of the DRB1-3 (DRB3*03:01) beta chain amino acid sequence GenBank AAN15205.1 in FIG. 8.

[0143] A “DRB3 polypeptide” includes allelic variants, e.g., naturally occurring allelic variants. Thus, in some cases, a suitable DRB3 polypeptide comprises the following amino acid sequence: DTRPRFLELR KSECHFFNGT ERVRYLDRYF HNQEEFLRFD SDVGEYRAVT ELGRPVAESW NSQKDLLEQK RGRVDNYCRH NYGVGESFTV QRRVHPQVTV YPAKTQPLQH HNLLVCSVSG FYPGSIEVRW FRNGQEEKAG VVSTGLIQNG DWTFQTLVML ETVPRSGEVY TCQVEHPSVT SALTVEWRAR SESAQSK (SEQ ID NO: 27), or an allelic variant thereof.

[0144] A suitable DRB3 β1 domain comprises an amino acid sequence having at least 60%, at least 70%, at least 80%, at least 90%, at least 95%, at least 98%, at least 99%, or 100%, amino acid sequence identity to the following amino acid sequence: DTRPRFLELR KSECHFFNGT ERVRYLDRYF HNQEEFLRFD SDVGEYRAVT ELGRPVAESW NSQKDLLEQK RGRVDNYCRH NYGVGESFTV QRRV (SEQ ID NO: 28); and can have a length of about 95 amino acids (e.g., 93, 94, 95, 96, 97, or 98 amino acids). A suitable DRB3 β1 domain can comprise the following amino acid sequence: DTRPRFLELR KSECHFFNGT ERVRYLDRYF HNQEEFLRFD SDVGEYRAVT ELGRPVAESW NSQKDLLEQK RGRVDNYCRH NYGVGESFTV QRRV (SEQ ID NO: 28), or a naturally-occurring allelic variant.

[0145] A suitable DRB3 β2 domain comprises an amino acid sequence having at least 60%, at least 70%, at least 80%, at least 90%, at least 95%, at least 98%, at least 99%, or 100%, amino acid sequence identity to the following amino acid sequence: HPQVTV YPAKTQPLQH HNLLVCSVSG FYPGSIEVRW FRNGQEEKAG VVSTGLIQNG DWTFQTLVML ETVPRSGEVY TCQVEHPSVT SALTVEWRAR SESAQSK (SEQ ID NO: 29); and can have a length of about 103 amino acids (e.g., 100, 101, 102, 103, 104, or 105 amino acids). A suitable DRB3 β2 domain can comprise the following amino acid sequence: HPQVTV YPAKTQPLQH HNLLVCSVSG FYPGSIEVRW FRNGQEEKAG VVSTGLIQNG DWTFQTLVML ETVPRSGEVY TCQVEHPSVT SALTVEWRAR SESAQSK (SEQ ID NO: 29), or a naturally-occurring allelic variant thereof.

### DRB4

[0146] In some cases, a suitable MHC Class II β chain polypeptide is a DRB4 polypeptide. A DRB4 polypeptide can have at least 60%, at least 70%, at least 80%, at least 90%, at least 95%, at least 98%, at least 99%, or 100%, amino acid sequence identity with amino acids 30-227 of the DRB4 amino acid sequence depicted in FIG. 9. In some cases, the DRB4 polypeptide has a length of about 198 amino acids (e.g., 195, 196, 197, 198, 199, 200, 201, or 202 amino acids).

[0147] A “DRB4 polypeptide” includes allelic variants, e.g., naturally occurring allelic variants. Thus, in some cases, a suitable CDR4 polypeptide comprises the following amino acid sequence: T VLSSPLALAG DTQPRFLEQA KCECHFLNGT ERVWNLIRYI YNQEEYARYN SDLGEYQAVT ELGRPDAEYW NSQKDLLERR RAEVDTYCRY NYGVVESFTV QRRVQPKVTV YPSKTQPLQH HNLLVCSVNG FYPGSIEVRW FRNGQEEKAG VVSTGLIQNG DWTFQTLVML ETVPRSGEVY TCQVEHPSMM SPLTVQWSAR SESAQSK (SEQ ID NO: 30), or an allelic variant thereof.

[0148] A suitable DRB4 β1 domain comprises an amino acid sequence having at least 60%, at least 70%, at least 80%, at least 90%, at least 95%, at least 98%, at least 99%, or 100%, amino acid sequence identity to the following amino acid sequence: T VLSSPLALAG DTQPRFLEQA KCECHFLNGT ERVWNLIRYI YNQEEYARYN SDLGEYQAVT ELGRPDAEYW NSQKDLLERR RAEVDTYCRY NYGVVESFTV QRRV (SEQ ID NO: 31); and can have a length of about 95 amino acids (e.g., 93, 94, 95, 96, 97, or 98 amino acids). A suitable DRB4 β1 domain can comprise the following amino acid sequence: T VLSSPLALAG DTQPRFLEQA KCECHFLNGT ERVWNLIRYI YNQEEYARYN SDLGEYQAVT ELGRPDAEYW NSQKDLLERR RAEVDTYCRY NYGVVESFTV QRRV (SEQ ID NO: 31), or a naturally-occurring allelic variant.

[0149] A suitable DRB4 β2 domain comprises an amino acid sequence having at least 60%, at least 70%, at least 80%, at least 90%, at least 95%, at least 98%, at least 99%, or 100%, amino acid sequence identity to the following amino acid sequence: QPKVTV YPSKTQPLQH HNLLVCSVNG FYPGSIEVRW FRNGQEEKAG VVSTGLIQNG DWTFQTLVML ETVPRSGEVY TCQVEHPSMM SPLTVQWSAR SESAQSK (SEQ ID NO: 32); and can have a length of about 103 amino acids (e.g., 100, 101, 102, 103, 104, or 105 amino acids). A suitable DRB4 β2 domain can comprise the following amino acid sequence: QPKVTV YPSKTQPLQH HNLLVCSVNG FYPGSIEVRW FRNGQEEKAG VVSTGLIQNG DWTFQTLVML ETVPRSGEVY TCQVEHPSMM SPLTVQWSAR SESAQSK (SEQ ID NO: 32), or a naturally-occurring allelic variant thereof.

### DRB5

[0150] In some cases, a suitable MHC Class II β chain polypeptide is a DRB5 polypeptide. A DRB5 polypeptide can have at least 60%, at least 70%, at least 80%, at least 90%, at least 95%, at least 98%, at least 99%, or 100%, amino acid sequence identity with amino acids 30-227 of the DRB5 amino acid sequence depicted in FIG. 10. In some cases, the DRB5 polypeptide has a length of about 198 amino acids (e.g., 195, 196, 197, 198, 199, 200, 201, or 202 amino acids).

[0151] A “DRB5 polypeptide” includes allelic variants, e.g., naturally occurring allelic variants. Thus, in some cases, a suitable DRB5 polypeptide comprises the following amino acid sequence: M VLSSPLALAG DTRPRFLQQD KYECHFFNGT ERVRFLHRDI YNQEEDLRFD SDVGEYRAVT ELGRPDAEYW NSQKDFLEDR RAAVDTYCRH NYGVGESFTV QRRVEPKVTV YPARTQTLQH HNLLVCSVNG FYPGSIEVRW FRNSQEEKAG VVSTGLIQNG DWTFQTLVML ETVPRSGEVY TCQVEHPSVT SPLTVEWRAQ SESAQS (SEQ ID NO: 33), or an allelic variant thereof.

[0152] A suitable DRB5 β1 domain comprises an amino acid sequence having at least 60%, at least 70%, at least 80%, at least 90%, at least 95%, at least 98%, at least 99%, or 100%, amino acid sequence identity to the following amino acid sequence: M VLSSPLALAG DTRPRFLQQD KYECHFFNGT ERVRFLHRDI YNQEEDLRFD SDVGEYRAVT ELGRPDAEYW NSQKDFLEDR RAAVDTYCRH NYGVGESFTV QRRV (SEQ ID NO: 34); and can have a length of about 95 amino acids (e.g., 93, 94, 95, 96, 97, or 98 amino acids). A suitable DRB5 β1 domain can comprise the following amino acid sequence: M VLSSPLALAG DTRPRFLQQD KYECHFFNGT ERVRFLHRDI YNQEEDLRFD SDVGEYRAVT ELGRPDAEYW NSQKDFLEDR RAAVDTYCRH NYGVGESFTV QRRV (SEQ ID NO: 34), or a naturally-occurring allelic variant.

[0153] A suitable DRB5 β2 domain comprises an amino acid sequence having at least 60%, at least 70%, at least 80%, at least 90%, at least 95%, at least 98%, at least 99%, or 100%, amino acid sequence identity to the following amino acid sequence: EPKVTV YPARTQTLQH HNLLVCSVNG FYPGSIEVRW FRNSQEEKAG VVSTGLIQNG DWTFQTLVML ETVPRSGEVY TCQVEHPSVT SPLTVEWRAQ SESAQS (SEQ ID NO: 35); and can have a length of about 103 amino acids (e.g., 100, 101, 102, 103, 104, or 105 amino acids). A suitable DRB5 β2 domain can comprise the following amino acid sequence: EPKVTV YPARTQTLQH HNLLVCSVNG FYPGSIEVRW FRNSQEEKAG VVSTGLIQNG DWTFQTLVML ETVPRSGEVY TCQVEHPSVT SPLTVEWRAQ SESAQS (SEQ ID NO: 35), or a naturally-occurring allelic variant thereof.

### DMB

[0154] In some cases, a suitable MHC Class II β chain polypeptide is a DMB polypeptide. A DMB polypeptide can have at least 60%, at least 70%, at least 80%, at least 90%, at least 95%, at least 98%, at least 99%, or 100%, amino acid sequence identity with amino acids 19-207 of the DMB amino acid sequence depicted in FIG. 12. In some cases, the DMB polypeptide has a length of about 189 amino acids (e.g., 187, 188, 189, 190, or 191 amino acids).

[0155] A “DMB polypeptide” includes allelic variants, e.g., naturally occurring allelic variants. Thus, in some cases, a suitable DMB polypeptide comprises the following amino acid sequence: GG FVAHVESTCL LDDAGTPKDF TYCISFNKDL LTCWDPEENK MAPCEFGVLN SLANVLSQHL NQKDTLMQRL RNGLQNCATH TQPFWGSLTN RTRPPSVQVA KTTPFNTREP VMLACYVWGF YPAEVTITWR KNGKLVMPHS SAHKTAQPNG DWTYQTLSHL ALTPSYGDTY TCVVEHTGAP EPILRDW (SEQ ID NO: 36), or an allelic variant thereof.

[0156] A suitable DMB β1 domain comprises an amino acid sequence having at least 60%, at least 70%, at least 80%, at least 90%, at least 95%, at least 98%, at least 99%, or 100%, amino acid sequence identity to the following amino acid sequence: GG FVAHVESTCL LDDAGTPKDF TYCISFNKDL LTCWDPEENK MAPCEFGVLN SLANVLSQHL NQKDTLMQRL RNGLQNCATH TQPFWGSLTN RT (SEQ ID NO: 37); and can have a length of about 94 amino acids (e.g., 92, 93, 94, 95, 96, or 97 amino acids). A suitable DMB 01 domain can comprise the following amino acid sequence: GG FVAHVESTCL LDDAGTPKDF TYCISFNKDL LTCWDPEENK MAPCEFGVLN SLANVLSQHL NQKDTLMQRL RNGLQNCATH TQPFWGSLTN RT (SEQ ID NO: 37), or a naturally-occurring allelic variant.

[0157] A suitable DMB β2 domain comprises an amino acid sequence having at least 60%, at least 70%, at least 80%, at least 90%, at least 95%, at least 98%, at least 99%, or 100%, amino acid sequence identity to the following amino acid sequence: RPPSVQVA KTTPFNTREP VMLACYVWGF YPAEVTITWR KNGKLVMPHS SAHKTAQPNG DWTYQTLSHL ALTPSYGDTY TCVVEHTGAP EPILRDW (SEQ ID NO: 38); and can have a length of about 95 amino acids (e.g., 93, 94, 95, 96, 97, or 98 amino acids). A suitable DMB β2 domain can comprise the following amino acid sequence: RPPSVQVA KTTPFNTREP VMLACYVWGF YPAEVTITWR KNGKLVMPHS SAHKTAQPNG DWTYQTLSHL ALTPSYGDTY TCVVEHTGAP EPILRDW (SEQ ID NO: 38), or a naturally-occurring allelic variant thereof.

### DOB

[0158] In some cases, a suitable MHC Class II β chain polypeptide is a DOB polypeptide. A DOB polypeptide can have at least 60%, at least 70%, at least 80%, at least 90%, at least 95%, at least 98%, at least 99%, or 100%, amino acid sequence identity with amino acids 27-214 of the DOB amino acid sequence depicted in FIG. 14. In some cases, the DOB polypeptide has a length of about 188 amino acids (e.g., 186, 187, 188, 189, or 190 amino acids).

[0159] A “DOB polypeptide” includes allelic variants, e.g., naturally occurring allelic variants. Thus, in some cases, a suitable DOB polypeptide comprises the following amino acid sequence: TDSP EDFVIQAKAD CYFTNGTEKV QFVVRFIFNL EEYVRFDSDV GMFVALTKLG QPDAEQWNSR LDLLERSRQA VDGVCRHNYR LGAPFTVGRK VQPEVTVYPE RTPLLHQHNL LHCSVTGFYP GDIKIKWFLN GQEERAGVMS TGPIRNGDWT FQTVVMLEMT PELGHVYTCL VDHSSLLSPV SVEW (SEQ ID NO: 39), or an allelic variant thereof.

[0160] A suitable DOB β1 domain comprises an amino acid sequence having at least 60%, at least 70%, at least 80%, at least 90%, at least 95%, at least 98%, at least 99%, or 100%, amino acid sequence identity to the following amino acid sequence: TDSP EDFVIQAKAD CYFTNGTEKV QFVVRFIFNL EEYVRFDSDV GMFVALTKLG QPDAEQWNSR LDLLERSRQA VDGVCRHNYR LGAPFTVGRK (SEQ ID NO: 40); and can have a length of about 94 amino acids (e.g., 92, 93, 94, 95, 96, or 97 amino acids). A suitable DOB β1 domain can comprise the following amino acid sequence: TDSP EDFVIQAKAD CYFTNGTEKV QFVVRFIFNL EEYVRFDSDV GMFVALTKLG QPDAEQWNSR LDLLERSRQA VDGVCRHNYR LGAPFTVGRK (SEQ ID NO: 40), or a naturally-occurring allelic variant.

[0161] A suitable DOB β2 domain comprises an amino acid sequence having at least 60%, at least 70%, at least 80%, at least 90%, at least 95%, at least 98%, at least 99%, or 100%, amino acid sequence identity to the following amino acid sequence: VQPEVTVYPE RTPLLHQHNL LHCSVTGFYP GDIKIKWFLN GQEERAGVMS TGPIRNGDWT FQTVVMLEMT PELGHVYTCL VDHSSLLSPV SVEW (SEQ ID NO: 41); and can have a length of about 94 amino acids (e.g., 92, 93, 94, 95, 96, or 97 amino acids). A suitable DOB β2 domain can comprise the following amino acid sequence: VQPEVTVYPE RTPLLHQHNL LHCSVTGFYP GDIKIKWFLN GQEERAGVMS TGPIRNGDWT FQTVVMLEMT PELGHVYTCL VDHSSLLSPV SVEW (SEQ ID NO: 41), or a naturally-occurring allelic variant thereof.

### DPB1

[0162] In some cases, a suitable MHC Class II β chain polypeptide is a DPB1 polypeptide. A DPB1 polypeptide can have at least 60%, at least 70%, at least 80%, at least 90%, at least 95%, at least 98%, at least 99%, or 100%, amino acid sequence identity with amino acids 30-215 of any of the DPB1 amino acid sequences depicted in FIG. 16. In some cases, the DPB1 polypeptide has a length of about 186 amino acids (e.g., 184, 185, 186, 187, or 188 amino acids). In an embodiment, a DRB3 β chain polypeptide can have at least 60%, at least 70%, at least 80%, at least 90%, at least 95%, at least 98%, at least 99%, or 100%, amino acid sequence identity with amino acids 30-227 of the DPB1*01:01 beta chain amino acid sequence in FIG. 16 IMGT/HLA Acc No: HLA00514. In an embodiment, a DRB3 β chain polypeptide can have at least 60%, at least 70%, at least 80%, at least 90%, at least 95%, at least 98%, at least 99%, or 100%, amino acid sequence identity with amino acids 30-227 of the DPB1*01:01 beta chain amino acid sequence in FIG. 16, IMGT/HLA Acc No: HLA00517. In an embodiment, a DRB3 β chain polypeptide can have at least 60%, at least 70%, at least 80%, at least 90%, at least 95%, at least 98%, at least 99%, or 100%, amino acid sequence identity with amino acids 30-227 of the DPB1*03:01 beta chain amino acid sequence in FIG. 16, IMGT/HLA Acc No: HLA00520. In an embodiment, a DRB3 β chain polypeptide can have at least 60%, at least 70%, at least 80%, at least 90%, at least 95%, at least 98%, at least 99%, or 100%, amino acid sequence identity with amino acids 30-227 of the DPB1*04:01 beta chain amino acid sequence in FIG. 16, IMGT/HLA Acc No: HLA00521, GenBank NP_002112.3. In an embodiment, a DRB3 β chain polypeptide can have at least 60%, at least 70%, at least 80%, at least 90%, at least 95%, at least 98%, at least 99%, or 100%, amino acid sequence identity with amino acids 30-227 of the DPB106:01 beta chain amino acid sequence in FIG. 16, IMGT/HLA Acc No: HLA00524. In an embodiment, a DRB3 β chain polypeptide can have at least 60%, at least 70%, at least 80%, at least 90%, at least 95%, at least 98%, at least 99%, or 100%, amino acid sequence identity with amino acids 30-227 of the DPB1*11:01 beta chain amino acid sequence in FIG. 16, IMGT/HLA Acc No: HLA00528. In an embodiment, a DRB3 β chain polypeptide can have at least 60%, at least 70%, at least 80%, at least 90%, at least 95%, at least 98%, at least 99%, or 100%, amino acid sequence identity with amino acids 30-227 of the DPB1*71:01 beta chain amino acid sequence in FIG. 16, IMGT/HLA Acc No:HLA00590. In an embodiment, a DRB3 β chain polypeptide can have at least 60%, at least 70%, at least 80%, at least 90%, at least 95%, at least 98%, at least 99%, or 100%, amino acid sequence identity with amino acids 30-227 of the DPB1*104:01 beta chain amino acid sequence in FIG. 16, IMGT/HLA Acc No: HLA02046. In an embodiment, a DRB3 β chain polypeptide can have at least 60%, at least 70%, at least 80%, at least 90%, at least 95%, at least 98%, at least 99%, or 100%, amino acid sequence identity with amino acids 30-227 of the DPB1*141:01 beta chain amino acid sequence in FIG. 16, IMGT/HLA Acc No: HLA10364.

[0163] A “DPB1 polypeptide” includes allelic variants, e.g., naturally occurring allelic variants. Thus, in some cases, a suitable DPB1 polypeptide comprises the following amino acid sequence: R ATPENYLFQG RQECYAFNGT QRFLERYIYN REEFARFDSD VGEFRAVTEL GRPAAEYWNS QKDILEEKRA VPDRMCRHNY ELGGPMTLQR RVQPRVNVSP SKKGPLQHHN LLVCHVTDFY PGSIQVRWFL NGQEETAGVV STNLIRNGDW TFQILVMLEM TPQQGDVYTC QVEHTSLDSP VTVEW (SEQ ID NO: 42), or an allelic variant thereof.

[0164] A suitable DPB1 β1 domain comprises an amino acid sequence having at least 60%, at least 70%, at least 80%, at least 90%, at least 95%, at least 98%, at least 99%, or 100%, amino acid sequence identity to the following amino acid sequence: R ATPENYLFQG RQECYAFNGT QRFLERYIYN REEFARFDSD VGEFRAVTEL GRPAAEYWNS QKDILEEKRA VPDRMCRHNY ELGGPMTLQR R (SEQ ID NO: 43); and can have a length of about 92 amino acids (e.g., 90, 91, 92, 93, or 94 amino acids). A suitable DPB1 β1 domain can comprise the following amino acid sequence: R ATPENYLFQG RQECYAFNGT QRFLERYIYN REEFARFDSD VGEFRAVTEL GRPAAEYWNS QKDILEEKRA VPDRMCRHNY ELGGPMTLQR R (SEQ ID NO: 43), or a naturally-occurring allelic variant.

[0165] A suitable DPB1 β2 domain comprises an amino acid sequence having at least 60%, at least 70%, at least 80%, at least 90%, at least 95%, at least 98%, at least 99%, or 100%, amino acid sequence identity to the following amino acid sequence: VQPRVNVSP SKKGPLQHHN LLVCHVTDFY PGSIQVRWFL NGQEETAGVV STNLIRNGDW TFQILVMLEM TPQQGDVYTC QVEHTSLDSP VTVEW (SEQ ID NO: 44); and can have a length of about 94 amino acids (e.g., 92, 93, 94, 95, 96, or 97 amino acids). A suitable DPB1 β2 domain can comprise the following amino acid sequence: VQPRVNVSP SKKGPLQHHN LLVCHVTDFY PGSIQVRWFL NGQEETAGVV STNLIRNGDW TFQILVMLEM TPQQGDVYTC QVEHTSLDSP VTVEW (SEQ ID NO: 44), or a naturally-occurring allelic variant thereof.

### DQB1

[0166] In some cases, a suitable MHC Class II β chain polypeptide is a DQB1 polypeptide. A DQB1 polypeptide can have at least 60%, at least 70%, at least 80%, at least 90%, at least 95%, at least 98%, at least 99%, or 100%, amino acid sequence identity with amino acids 33-220 of the DQB1 amino acid sequence depicted in FIG. 19A or FIG. 19B or FIG. 19C. In some cases, the DQB1 polypeptide has a length of about 188 amino acids (e.g., 186, 187, 188, 190, 191, or 192 amino acids).

[0167] A “DQB1 polypeptide” includes allelic variants, e.g., naturally occurring allelic variants. Thus, in some cases, a suitable DQB1 polypeptide comprises the following amino acid sequence: RDSPEDFV FQFKGMCYFT NGTERVRLVT RYIYNREEYA RFDSDVGVYR AVTPQGRPDA EYWNSQKEVL EGTRAELDTV CRHNYEVAFR GILQRRVEPT VTISPSRTEA LNHHNLLVCS VTDFYPGQIK VRWFRNDQEE TAGVVSTPLI RNGDWTFQIL VMLEMTPQRG DVYTCHVEHP SLQSPITVEW (SEQ ID NO: 45), or an allelic variant thereof.

[0168] A suitable DQB1 β1 domain comprises an amino acid sequence having at least 60%, at least 70%, at least 80%, at least 90%, at least 95%, at least 98%, at least 99%, or 100%, amino acid sequence identity to the following amino acid sequence: RDSPEDFV FQFKGMCYFT NGTERVRLVT RYIYNREEYA RFDSDVGVYR AVTPQGRPDA EYWNSQKEVL EGTRAELDTV CRHNYEVAFR GILQRR (SEQ ID NO: 46); and can have a length of about 94 amino acids (e.g., 92, 93, 94, 95, or 96 amino acids). A suitable DQB1 β1 domain can comprise the following amino acid sequence: RDSPEDFV FQFKGMCYFT NGTERVRLVT RYIYNREEYA RFDSDVGVYR AVTPQGRPDA EYWNSQKEVL EGTRAELDTV CRHNYEVAFR GILQRR (SEQ ID NO: 46), or a naturally-occurring allelic variant.

[0169] A suitable DQB1 β2 domain comprises an amino acid sequence having at least 60%, at least 70%, at least 80%, at least 90%, at least 95%, at least 98%, at least 99%, or 100%, amino acid sequence identity to the following amino acid sequence: VEPT VTISPSRTEA LNHHNLLVCS VTDFYPGQIK VRWFRNDQEE TAGVVSTPLI RNGDWTFQIL VMLEMTPQRG DVYTCHVEHP SLQSPITVEW (SEQ ID NO: 47); and can have a length of about 94 amino acids (e.g., 92, 93, 94, 95, or 96 amino acids). A suitable DQB1 β2 domain can comprise the following amino acid sequence: VEPT VTISPSRTEA LNHHNLLVCS VTDFYPGQIK VRWFRNDQEE TAGVVSTPLI RNGDWTFQIL VMLEMTPQRG DVYTCHVEHP SLQSPITVEW (SEQ ID NO: 47), or a naturally-occurring allelic variant thereof.

### DQB2

[0170] In some cases, a suitable MHC Class II β chain polypeptide is a DQB2 polypeptide. A DQB2 polypeptide can have at least 60%, at least 70%, at least 80%, at least 90%, at least 95%, at least 98%, at least 99%, or 100%, amino acid sequence identity with amino acids 33-215 of the DQB2 amino acid sequence depicted in FIG. 20A or FIG. 20. In some cases, the DQB2 polypeptide has a length of about 182 amino acids (e.g., 175, 176, 177, 178, 179, 180, 181, or 182 amino acids).

[0171] A “DQB2 polypeptide” includes allelic variants, e.g., naturally occurring allelic variants. Thus, in some cases, a suitable DQB2 polypeptide comprises the following amino acid sequence: DFLVQFK GMCYFTNGTE RVRGVARYIY NREEYGRFDS DVGEFQAVTE LGRSIEDWNN YKDFLEQERA AVDKVCRHNY EAELRTTLQR QVEPTVTISP SRTEALNHHN LLVCSVTDFY PAQIKVRWFR NDQEETAGVV STSLIRNGDW TFQILVMLEI TPQRGDIYTC QVEHPSLQSP ITVEW (SEQ ID NO: 48), or an allelic variant thereof.

[0172] A suitable DQB2 β1 domain comprises an amino acid sequence having at least 60%, at least 70%, at least 80%, at least 90%, at least 95%, at least 98%, at least 99%, or 100%, amino acid sequence identity to the following amino acid sequence: DFLVQFK GMCYFTNGTE RVRGVARYIY NREEYGRFDS DVGEFQAVTE LGRSIEDWNN YKDFLEQERA AVDKVCRHNY EAELRTTLQR QVEPTV (SEQ ID NO: 49); and can have a length of about 94 amino acids (e.g., 92 93, 94, 95, 96, or 97 amino acids). A suitable DQB2 β1 domain can comprise the following amino acid sequence: DFLVQFK GMCYFTNGTE RVRGVARYIY NREEYGRFDS DVGEFQAVTE LGRSIEDWNN YKDFLEQERA AVDKVCRHNY EAELRTTLQR QVEPTV (SEQ ID NO: 49), or a naturally-occurring allelic variant.

[0173] A suitable DQB2 β2 domain comprises an amino acid sequence having at least 60%, at least 70%, at least 80%, at least 90%, at least 95%, at least 98%, at least 99%, or 100%, amino acid sequence identity to the following amino acid sequence: TISP SRTEALNHHN LLVCSVTDFY PAQIKVRWFR NDQEETAGVV STSLIRNGDW TFQILVMLEI TPQRGDIYTC QVEHPSLQSP ITVEW (SEQ ID NO: 50); and can have a length of about 94 amino acids (e.g., 92 93, 94, 95, 96, or 97 amino acids). A suitable DQB2 β2 domain can comprise the following amino acid sequence: TISP SRTEALNHHN LLVCSVTDFY PAQIKVRWFR NDQEETAGVV STSLIRNGDW TFQILVMLEI TPQRGDIYTC QVEHPSLQSP ITVEW (SEQ ID NO: 50), or a naturally-occurring allelic variant thereof.

### Disease Risk-Associated Alleles and Haplotypes

[0174] Certain alleles and haplotypes of MHC Class II have been associated with disease, e.g., increased risk of developing a particular disease. See, e.g., Erlich et al. (2008) Diabetes 57:1084; Gough and Simmonds (2007) Curr. Genomics 8:453; Mitchell et al. (2007) Robbins Basic Pathology Philadelphia: Saunders, 8^{th} ed.; Margaritte-Jeannin et al. (2004) Tissue Antigens 63:562; and Kurko et al. (2013) Clin. Rev. Allergy Immunol. 45:170.

### MHC Class II Polypeptides in Type 1 Diabetes Mellitus (T1D)

[0175] T1D is associated with alleles belonging to the HLA-DR3 and HLA-DR4 haplotypes/serotypes, with the strongest risk associated with the HLA-DQ8, (e.g., HLA-DQB1*03:02) and alleles of the HLA-DQ2 serotype. Some high and moderate risk haplotypes and their association with various DR serotypes are shown in the following table adopted from Kan [symbol] rov [symbol] and Buc, Physiol. Res. 56: 255-266 (2007).

| | | | | |
|---|---|---|---|---|
| DR | | DQ | | |
| serotype | DRB allele | serotype | DQA allele | DQB allele |

High risk T1D haplotypes

| | | | | |
|---|---|---|---|---|
| DR3 | DRB1*0301 | DQ 2.5 | DQA1*0501 | DQB1*0201 |
| DR4 | DRB1*0401 | DQ 8.1 | DQA1*0301 | DQB1*0302 |
| DR4 | DRB1*0402 | DQ 8.1 | DQA1*0301 | DQB1*0302 |
| DR4 | DRB1*0405 | DQ 8.1 | DQA1*0301 | DQB1*0302 |

Moderate risk T1D haplotypes

| | | | | |
|---|---|---|---|---|
| DR1 | DRB1*01 | DQ 5 | DQA1*0101 | DQB1*0501 |
| DR8 | DRB1*0801 | | DQA1*0401 | DQB1*0402 |
| DR9 | DRB1*0901 | | DQA1*0301 | DQB1*0303 |

[0176] The stereotypically defined DR3 and DR4 protein isoforms/haplotypes of the DRB1 gene are associated with increased risk that an individual expressing such alleles will develop T1D. The DR3 serotype includes the alleles encoding the DRB1*03:01, *03:02, *03:03, and *03:04 proteins, with the HLA-DRB1*0301 allele often found associated with a predisposition to T1D. The DR4 serotype includes the alleles encoding the DRB1*04:01, *04:02, *04:03, *04:04, *04:05, *04:06, *04:07, *04:08, *04:09, *04:10, *04:11, *04:12, and *04:13 proteins. Certain HLA-DR4 (e.g., HLA-DRB1*0401 and HLA-DRB1*0405) predispose individuals to T1D, whereas HLA-DRB1*04:03 allele/isoform may afford protection. DRB1*16:01 also show an increased frequency in diabetic children relative to healthy controls (Deja, et al., Mediators of Inflammation 2006:1-7 (2006)). Alleles/isoforms showing increased association with T1D represent suitable sources of MHC II α1, α2, β1, and β2 polypeptide sequences.

[0177] DQ2 and DQ8 are serotypes within the HLA-DQ system that are determined by recognition of DQ β-chains. While T1D is associated with DR3 and DR4 alleles as discussed above, among the strongest associated risk factors for T1D are the presence of the HLA-DQ8 serotype (e.g., the HLA-DQB1*03:02 isoform), particularly the HLA-DQ8.1 serotype (HLA-DQA1*03:01/DQB1*03:02) and the alleles of the HLA-DQ2 serotype (e.g., DQB1*02 alleles such as DQB1*02:01, DQB1*02:02, or DQB1*02:03). Jones, et al., Nat. Rev. Immunol. 2006, 6: 271-282. By contrast, individuals that carry the HLADQB1* 0602 allele appear to be protected against type 1 diabetes. Id.

[0178] DQ2 is most common in Western Europe, North Africa and East Africa, with the highest frequencies observed in parts of Spain and Ireland. Although the HLA-DR associations with T1D are not as strong as those of HLA-DQ, insulin-reactive T cells derived from lymph nodes draining the pancreas of patients with TID appear to be HLA-DR4.1 restricted rather than HLA-DQ8 or HLA-DQ2 restricted (Kent et al., Nature 2005 435: 224-228). The crystal structure of HLA-DQ2 shows a distinctive P6 pocket with a large volume and polar character defined by the presence of Ser30β (see e.g. FIG. 19B Ser, 62) rather than Tyr30β, which is typically found in other HLA-DQ molecules. This is a unique feature of HLA-DQ2, as is the presence of a positively charged lysine residue at 710 (see FIG. 19B Lys 103); when combined with the polar nature of the P4 and P9 pockets, makes this MHC class II peptide binding groove the most suitable for accommodating peptides with negatively charged anchor residues (see e.g., Jones et al, Nat. Rev. Immunol. 2006, 6: 271-282). This is a key factor in allowing HLA-DQ2 to present gluten-derived peptides that are high in proline and glutamate residues (generated by deamidation of glutamines). Id. In an embodiment, Ser30β of DQ2 (e.g., DQB1*02:01) molecules can be replaced with a cysteine (S30C) to permit conjugation of a peptide epitope that is co-translated as part of a T-cell modulatory antigen-presenting polypeptide to that position (e.g., utilizing a cysteine at position 6 the peptide epitope).

[0179] The DQB1 locus alone has also been reported to be associated with TID when position β57 is a neutral residue such as Ala or Ser. Both the DQ2 and DQ8 serotypes, which are associated with TID, lack an Asp at the 57β position, and instead have an Ala in its place (see e.g., Ala 89 in FIG. 19B HLA-DQB1*02:01 and 19C, HLA-DQB1*03:02 respectively) conferred T1D susceptibility. In contrast, DQB1*06:02, which has an Asp) at position 057 of DQB1 (position 89 in FIG. 19A) was found to be associated with resistance to T1D. Jones et al, Nat. Rev. Immunol. 2006, 6: 271-282. Position β57 of the molecule forms a critical residue in peptide binding pocket nine (P9) of the DQB1, which is involved in antigen presentation and T cell receptor (TCR) interaction.

[0180] Individuals with the HLA haplotype DQA1*03:01-DRB1*03:02, especially when combined with DQA1*05:01-DRB1*02:01, are highly susceptible (10-20-fold increase) to T1D, see Notkins, A. L., J. Biol. Chem., 2002, 277(46): 43545-48. Among the stereotypically defined groups showing susceptibility to T1D are HLA-DR4.1 (HLA-DRA1*01:01/DRB1*04:01), HLA-DR4.5 (HLA-DRA1*01:01/DRB1*04:05), HLA-DQ2.5 (HLA-DQA1*05:01/DQB1*02:01), and HLA-DQ8.1 (HLA-DQA1*03:01/DQB1*03:02). (see e.g., Jones et al., Nat. Rev. Immunol. 2006, 6: 271-282). The DRβ1*04:05-DQβ1*04:01/DRβ1*08:02-DQβ1*03:02 genotype has shown to be associated with acute-onset and slow progressive T1D. Fulminant diabetes has been associated with DRβ1*04:05-DQβ1*040:1/DRβ1*04:05-DQβ1*04:01 genotype, in a Japanese population study Kawabata, et al., Diabetologia 2009, 52:2513-21.

[0181] The above-mentioned alleles associated with an increased risk of T1D represent suitable candidates from which the α1, α2, β1, and/or β2 polypeptide sequences present in a TMAPP of the present disclosure may be taken. In an embodiment, the TMAPP is DQ2.5-like with the α1 and α2 polypeptides from DQA1*0501, and the β1 and β2 polypeptides taken from DQB1*0201. In an embodiment, the TMAPP is DQ8.1-like with the α1 and α2 polypeptides from DQA1*0301, and the β1 and β2 polypeptides taken from DQB1*0302.

### MHC Class II Polypeptides and Celiac Disease

[0182] HLA haplotypes DQ2 and DQ8 are associated with increased risk that an individual expressing such HLA haplotypes will develop celiac disease. DQ2 represents the second highest risk factor for celiac disease, the highest risk is a close family member with disease. It is estimated that approximately 95% of all celiac patients have at least one DQ2 allele, and of those individuals about 30% have two copies of a DQ2 allele. DQ2 isoforms vary in their association with celiac disease. The DQ2.5 isoform (DQB1*02:01/DQA1*05:01) being strongly associated. DQB1*0201 is genetically linked to DQA1*05:01 forming the DQ2.5 haplotype. DQ2.5 is present in high levels in northern, islandic Europe, and the Basque region of Spain with the phenotype frequency exceeding 50% in parts of Ireland.

[0183] The immunodominant site for DQ2.5 is on α2-gliadin, which has a protease resistant 33mer that has 6 overlapping DQ2.5 restricted epitopes. The multiple epitopes produce strong binding of T-cells to the DQ2.5-33mer complexes. DQ2.5 binds gliadin, but the binding is sensitive to deamidation caused by tissue transglutaminase, whose action produces most of the highest affinity sites/epitopes. All or part of the 33mer (LQLQPFPQPELPYPQPELPYPQPELPYPQPQPF; SEQ ID NO: 51) or a similarly described 19mer (LGQQQPFPPQQPYPQPQPF; SEQ ID NO: 52) (e.g., 8 or more, 9, or more, 10 or more, 12, or more, 14 or more, or 16 or more contiguous amino acids) may be utilized as a peptide epitope. See, e.g., Bruun, et al. 2016, J. Diabetes Res. 2016, 2016:1-11 Article ID 2424306.

[0184] As noted above, T1D is associated with the DQ2.5 phenotype, and there may be a link between Gluten-Sensitive Enteropathy (GSE) and early onset male T1D. Recent studies indicate a combination of DQ2.5 and DQ8 (both acid peptide presenters) greatly increase the risk of adult onset T1D. The presence of DQ2 with DR3 may decrease the age of onset and the severity of the autoimmune disorders.

[0185] While the DQ2.5 haplotype confers the single highest known genetic risk for celiac disease, comparable risk can also come from very similar alleles of different haplotypes (e.g., other DQA1*05 and DQB1*02 alleles). The DQ2.2 phenotype has the form α2-β2 (e.g., DQA1*02:01:DQB1*0202), and is associated with the occurrence of some celiac disease. Because the HLA DQB1*0202 and its linked DQA1* alleles of the DQ2.2 haplotype do not produce a DQA1*05 subunit (α5 e.g., DQA1*05:01) DQ2.2 the heterodimer cannot effectively present α-2 gliadin, it can, however, present other gliadins. Accordingly, a multimeric or single chain T-cell modulatory antigen-presenting polypeptides comprising DQ 2.2 polypeptide sequences (e.g., DQA1*02:01:DQB1*0202) may be used to present non-α-2 gliadin peptides.

[0186] The DQ2.2/DQ7.5 phenotype, also referred to as DQ2.5trans is also associated with celiac disease. The serotypically defined DQ7.5 phenotype has a DQA1*0505:DQB1*0301 haplotype. When DQA1*0505 or DQA1*0501 gene products are processed to the cell surface they become the α5 and can assemble a MHC class II molecule with either of the DQ 2.2 alleles DQB1*0202 and DQB1*0201. As a result, the isoforms produced by the phenotype of two haplotypes, DQ2.2/DQ7.5, include HLA DQ α⁵β² (DQ2.5), α²β² (DQ2.2), α²β⁷ (DQ7.2, e.g., DQA1*0201:DQB1*0301), and α⁵β⁷ (DQ7.5).

[0187] DQ8 is involved in celiac disease in peoples where DQ2 is not present. The DQ8.1 haplotype encodes the DQA1*0301:DQB1*0302 haplotype. DQ8 is extremely high in Native Americans of Central America and tribes of Eastern American origin.

[0188] Two Class II HLA genotypes (DQA1*05:DQB1*02 {α⁵β²} and DQA1*03:DQB1* 03:02 {an α³β³}) contribute substantially to the genetic risk of celiac disease in families, and have been suggested to be virtually required for celiac disease to occur in Caucasian individuals (see Murry et al., Clin. Gastroenterol. Hepatol. 2007; 5(12): 1406-1412). Among the stereotypically defined groups showing susceptibility to T1D and Celiac disease are HLA-DQ2.5 (HLA-DQA1*05:01/DQB1*02:01) and HLA-DQ8.1 (HLA-DQA1*03:01/DQB1*03:02) (see e.g., Jones et al., Nat. Rev. Immunol. 2006, 6: 271-282).

[0189] The alleles associated with an increased risk of celiac disease described above represent suitable candidates from which the α1, α2, β1, and/or β2 polypeptide sequences of TMAPPs of the present disclosure may be taken. In an embodiment, the TMAPP is DQ2.5-like with the α1 and α2 polypeptides from DQA1*0501, and the R1 and β2 polypeptides taken from DQB1*0201. In an embodiment, the TMAPP is DQ2.2-like with the α1 and α2 polypeptides from DQA1*02:01, and the 01 and β2 polypeptides taken from DQB1*02:01. In an embodiment, the TMAPP is DQ8.1-like with the α1 and α2 polypeptides from DQA1*0301, and the β1 and β2 polypeptides taken from DQB1*0302. In an embodiment, the TMAPP comprises α1, α2, β1, and β2 polypeptides taken from isoforms produced by the DQ2.2/DQ7.5 haplotypes, including the HLA DQ α⁵β² (DQ2.5), α²β² (DQ2.2), α²β⁷ (DQ7.2, e.g., DQA1*0201:DQB1*0301), and α⁵β⁷ (DQ7.5) molecules.

### DRB1*03:01

[0190] DRB1*0301 (“DRB1*03:01” in FIG. 7) is associated with increased risk of developing T1D. Thus, in some cases, a TMAPP of the present disclosure comprises a DRB1*03:01 polypeptide comprising an amino acid sequence having at least 60%, at least 70%, at least 80%, at least 90%, at least 95%, at least 98%, at least 99%, or 100%, amino acid sequence identity to amino acids 30-227 of the DRB1*03:01 amino acid sequence depicted in FIG. 7. In some cases, a TMAPP of the present disclosure comprises a DRB1*03:01 polypeptide comprising an amino acid sequence having at least 60%, at least 70%, at least 80%, at least 90%, at least 95%, at least 98%, at least 99%, or 100%, amino acid sequence identity to amino acids 30-124 of the DRB1*03:01 amino acid sequence depicted in FIG. 7. In some cases, a TMAPP of the present disclosure comprises a DRB1*03:01 polypeptide comprising an amino acid sequence having at least 60%, at least 70%, at least 80%, at least 90%, at least 95%, at least 98%, at least 99%, or 100%, amino acid sequence identity to amino acids 125-227 of the DRB1*03:01 amino acid sequence depicted in FIG. 7.

### DRB1*04:01

[0191] DRB1*04:01 is associated with increased risk of developing T1D. Thus, in some cases, a TMAPP of the present disclosure comprises a DRB1*04:01 polypeptide comprising an amino acid sequence having at least 60%, at least 70%, at least 80%, at least 90%, at least 95%, at least 98%, at least 99%, or 100%, amino acid sequence identity to amino acids 30-227 of the DRB1*04:01 amino acid sequence depicted in FIG. 7. In some cases, a TMAPP of the present disclosure comprises a DRB1*04:01 polypeptide comprising an amino acid sequence having at least 60%, at least 70%, at least 80%, at least 90%, at least 95%, at least 98%, at least 99%, or 100%, amino acid sequence identity to amino acids 30-124 of the DRB1*04:01 amino acid sequence depicted in FIG. 7. In some cases, a TMAPP of the present disclosure comprises a DRB1*04:01 polypeptide comprising an amino acid sequence having at least 60%, at least 70%, at least 80%, at least 90%, at least 95%, at least 98%, at least 99%, or 100%, amino acid sequence identity to amino acids 125-227 of the DRB1*04:01 amino acid sequence depicted in FIG. 7.

### DRB1*04:02

[0192] DRB1*04:02 is associated with increased risk of developing T1D. Thus, in some cases, a TMAPP of the present disclosure comprises a DRB1*04:02 polypeptide comprising an amino acid sequence having at least 60%, at least 70%, at least 80%, at least 90%, at least 95%, at least 98%, at least 99%, or 100%, amino acid sequence identity to amino acids 30-227 of the DRB1*04:02 amino acid sequence provided below. In some cases, a TMAPP of the present disclosure comprises a DRB1*04:02 polypeptide comprising an amino acid sequence having at least 60%, at least 70%, at least 80%, at least 90%, at least 95%, at least 98%, at least 99%, or 100%, amino acid sequence identity to amino acids 30-124 of the DRB1*04:02 amino acid sequence provided below. In some cases, a TMAPP of the present disclosure comprises a DRB1*04:02 polypeptide comprising an amino acid sequence having at least 60%, at least 70%, at least 80%, at least 90%, at least 95%, at least 98%, at least 99%, or 100%, amino acid sequence identity to amino acids 125-227 of the DRB1*04:02 amino acid sequence provided below.

### DRB1*04:02:

(SEQ ID NO: 53)
[sequence omitted]

### DRB1*04:05

[0194] DRB1*04:05 is associated with increased risk of developing T1D. Thus, in some cases, a TMAPP of the present disclosure comprises a DRB1*04:05 polypeptide comprising an amino acid sequence having at least 60%, at least 70%, at least 80%, at least 90%, at least 95%, at least 98%, at least 99%, or 100%, amino acid sequence identity to amino acids 30-227 of the DRB1*04:05 amino acid sequence provided below. In some cases, a TMAPP of the present disclosure comprises a DRB1*04:05 polypeptide comprising an amino acid sequence having at least 60%, at least 70%, at least 80%, at least 90%, at least 95%, at least 98%, at least 99%, or 100%, amino acid sequence identity to amino acids 30-124 of the DRB1*04:05 amino acid sequence provided below. In some cases, a TMAPP of the present disclosure comprises a DRB1*04:05 polypeptide comprising an amino acid sequence having at least 60%, at least 70%, at least 80%, at least 90%, at least 95%, at least 98%, at least 99%, or 100%, amino acid sequence identity to amino acids 125-227 of the DRB1*04:05 amino acid sequence provided below.

[0195] DRB1*04:05:

(SEQ ID NO: 54)
[sequence omitted]

### DQA1*05:01-DQB1*02:01 (DQ2)

[0196] DQ2 (DQA1*05:01-DQB1*02:01) is associated with increased risk of developing celiac disease.

[0197] Thus, in some cases, a TMAPP of the present disclosure comprises a DQA1*05:01 polypeptide comprising an amino acid sequence having at least 60%, at least 70%, at least 80%, at least 90%, at least 95%, at least 98%, at least 99%, or 100%, amino acid sequence identity to amino acids 24-204 of the DQA1*05:01 amino acid sequence depicted in FIG. 17. In some cases, a TMAPP of the present disclosure comprises a DQA1*05:01 polypeptide comprising an amino acid sequence having at least 60%, at least 70%, at least 80%, at least 90%, at least 95%, at least 98%, at least 99%, or 100%, amino acid sequence identity to amino acids 24-110 of the DQA1*05:01 amino acid sequence depicted in FIG. 17. In some cases, a TMAPP of the present disclosure comprises a DQA1*05:01 polypeptide comprising an amino acid sequence having at least 60%, at least 70%, at least 80%, at least 90%, at least 95%, at least 98%, at least 99%, or 100%, amino acid sequence identity to amino acids 111-204 of the DQA1*05:01 amino acid sequence depicted in FIG. 17.

[0198] In some cases, a TMAPP of the present disclosure comprises a DQB1*02:01 polypeptide comprising an amino acid sequence having at least 60%, at least 70%, at least 80%, at least 90%, at least 95%, at least 98%, at least 99%, or 100%, amino acid sequence identity to amino acids 33 to 220 of the DQB1*02:01 amino acid sequence set forth below. In some cases, a TMAPP of the present disclosure comprises a DQB1*02:01 polypeptide comprising an amino acid sequence having at least 60%, at least 70%, at least 80%, at least 90%, at least 95%, at least 98%, at least 99%, or 100%, amino acid sequence identity to amino acids 33 to 126 of the DQB1*02:01 amino acid sequence set forth below. In some cases, a TMAPP of the present disclosure comprises a DQB1*02:01 polypeptide comprising an amino acid sequence having at least 60%, at least 70%, at least 80%, at least 90%, at least 95%, at least 98%, at least 99%, or 100%, amino acid sequence identity to amino acids 127 to 220 of the DQB1*02:01 amino acid sequence set forth below.

[0199] DQB1*02:01:

(SEQ ID NO: 55)
MSWKKALRIPGGLRAATVTLMLSMLSTPVAEGRDSPEDFVYQFKGMCYF
TNGTERVRLVSRSIYNREEIVRFDSDVGEFRAVTLLGLPAAEYWNSQKD
ILERKRAAVDRVCRHNYQLELRTTLQRRVEPTVTISPSRTEALNHHNLL
VCSVTDFYPAQIKVRWFRNDQEETAGVVSTPLIRNGDWTFQILVMLEMT
PQRGDVYTCHVEHPSLQSPITVEWRAQSESAQSKMLSGIGGFVLGLIFL
GLGLIIHHRSQKGLLH.

### DQA1*03:01-DQB1*03:02 (DQ8)

[0200] DQA1*03:01-DQB1*03:02 (DQ8) is associated with increased risk of developing celiac disease.

[0201] Thus, in some cases, a TMAPP of the present disclosure comprises a DQA1*03:01 polypeptide comprising an amino acid sequence having at least 60%, at least 70%, at least 80%, at least 90%, at least 95%, at least 98%, at least 99%, or 100%, amino acid sequence identity to amino acids 24-204 of the DQA1*03:02 amino acid sequence depicted in FIG. 17. In some cases, a TMAPP of the present disclosure comprises a DQA1*03:01 polypeptide comprising an amino acid sequence having at least 60%, at least 70%, at least 80%, at least 90%, at least 95%, at least 98%, at least 99%, or 100%, amino acid sequence identity to amino acids 24-110 of the DQA1*03:01 amino acid sequence depicted in FIG. 17. In some cases, a TMAPP of the present disclosure comprises a DQA1*03:01 polypeptide comprising an amino acid sequence having at least 60%, at least 70%, at least 80%, at least 90%, at least 95%, at least 98%, at least 99%, or 100%, amino acid sequence identity to amino acids 111-204 of the DQA1*03:01 amino acid sequence depicted in FIG. 17.

[0202] In some cases, a TMAPP of the present disclosure comprises a DQB1*03:02 polypeptide comprising an amino acid sequence having at least 60%, at least 70%, at least 80%, at least 90%, at least 95%, at least 98%, at least 99%, or 100%, amino acid sequence identity to amino acids 33-220 of the DQB1:03:02 amino acid sequence set forth below. In some cases, a TMAPP of the present disclosure comprises a DQB1*03:02 polypeptide comprising an amino acid sequence having at least 60%, at least 70%, at least 80%, at least 90%, at least 95%, at least 98%, at least 99%, or 100%, amino acid sequence identity to amino acids 33-126 of the DQB1*03:02 amino acid sequence set forth below. In some cases, a TMAPP of the present disclosure comprises a DQB1*03:02 polypeptide comprising an amino acid sequence having at least 60%, at least 70%, at least 80%, at least 90%, at least 95%, at least 98%, at least 99%, or 100%, amino acid sequence identity to amino acids 126-220 of the DQB1*03:02 amino acid sequence set forth below.

[0203] DQB1*03:02:

(SEQ ID NO: 56)
[sequence omitted]

### DRB1*0401 and DRA1*0101

[0204] In some cases, a TMAPP of the present disclosure comprises: i) an MHC α chain polypeptide comprising an amino acid sequence having at least 60%, at least 70%, at least 80%, at least 90%, at least 95%, at least 98%, at least 99%, or 100%, amino acid sequence identity to the following DRA1*0101 amino acid sequence: DKTHTCPPCPAPEAAGGPSVFLFPPKPKDTLMISRTPEVTCVVVDVSHEDPEVKFNWYV DGVEVHNAKTKPREEQYNSTYRVVSVLTVLHQDWLNGKEYKCKVSNKALPAPIEKTIS KAKGQPREPQVYTLPPSREEMTKNQVSLTCLVKGFYPSDIAVEWESNGQPENNYKTTPP VLDSDGSFFLYSKLTVDKSRWQQGNVFSCSVMHEALHNHYTQKSLSLSPG (SEQ ID NO: 57); and ii) an MHC β chain polypeptide comprising an amino acid sequence having at least 60%, at least 70%, at least 80%, at least 90%, at least 95%, at least 98%, at least 99%, or 100%, amino acid sequence identity to the following DRB1*0401 amino acid sequence: EVTVYPAKTQPLQHHNLLVCSVNGFYPASIEVRWFRNGQEEKTGVVSTGLIQNGDWTF QTLVMLETVPRSGEVYTCQVEHPSLTSPLTVEWRARSESAQSKM (SEQ ID NO: 58). In some cases, a TMAPP of the present disclosure comprises: i) a DRA1*0101 α chain polypeptide; and ii) a DRB1*0401β chain polypeptide.

### DQA1*0501 and DQB1*0201

[0205] In some cases, a TMAPP of the present disclosure comprises: i) an MHC α chain polypeptide comprising an amino acid sequence having at least 60%, at least 70%, at least 80%, at least 90%, at least 95%, at least 98%, at least 99%, or 100%, amino acid sequence identity to a DQA1*0501 α chain polypeptide; and ii) an MHC β chain polypeptide comprising an amino acid sequence having at least 60%, at least 70%, at least 80%, at least 90%, at least 95%, at least 98%, at least 99%, or 100%, amino acid sequence identity to a DQB1*0201 β chain polypeptide. In some cases, a TMAPP of the present disclosure comprises: i) a DQA1*0501 α chain polypeptide; and ii) a DQB1*02010 chain polypeptide.

### DQA1*0301 and DQB1*0302

[0206] In some cases, a TMAPP of the present disclosure comprises: i) an MHC α chain polypeptide comprising an amino acid sequence having at least 60%, at least 70%, at least 80%, at least 90%, at least 95%, at least 98%, at least 99%, or 100%, amino acid sequence identity to a DQA1*0301 α chain polypeptide; and ii) an MHC β chain polypeptide comprising an amino acid sequence having at least 60%, at least 70%, at least 80%, at least 90%, at least 95%, at least 98%, at least 99%, or 100%, amino acid sequence identity to a DQB1*0302 β chain polypeptide. In some cases, a TMAPP of the present disclosure comprises: i) a DQA1*0301 α chain polypeptide; and ii) a DQB1*0302 β chain polypeptide.

[0207] In some cases, a TMAPP of the present disclosure comprises an MHC Class II α- and/or β-chain allele that is associated with increased risk of developing a disease (e.g., T1D and/or celiac disease), e.g., where the individual to be treated with the TMAPP expresses the MHC Class II α- and/or β-chain allele.

### Scaffold Polypeptides

[0208] A TMAPP of the present disclosure, whether multimeric or monomeric, can comprise an immunoglobulin or non-immunoglobulin scaffold. A TMAPP polypeptide of the present disclosure, whether multimeric or monomeric, can comprise an Fc polypeptide, or can comprise another suitable scaffold polypeptide.

[0209] Suitable scaffold polypeptides include antibody-based scaffold polypeptides and non-antibody-based scaffolds. Non-antibody-based scaffolds include, e.g., albumin, an XTEN (extended recombinant) polypeptide, transferrin, an Fc receptor polypeptide, an elastin-like polypeptide (see, e.g., Hassouneh et al. (2012) Methods Enzymol. 502:215; e.g., a polypeptide comprising a pentapeptide repeat unit of (Val-Pro-Gly-X-Gly; SEQ ID NO: 59), where X is any amino acid other than proline), an albumin-binding polypeptide, a silk-like polypeptide (see, e.g., Valluzzi et al. (2002) Philos Trans R Soc Lond B Biol Sci. 357:165), a silk-elastin-like polypeptide (SELP; see, e.g., Megeed et al. (2002) Adv Drug Deliv Rev. 54:1075), and the like. Suitable XTEN polypeptides include, e.g., those disclosed in WO 2009/023270, WO 2010/091122, WO 2007/103515, US 2010/0189682, and US 2009/0092582; see also Schellenberger et al. (2009) Nat Biotechnol. 27:1186). Suitable albumin polypeptides include, e.g., human serum albumin.

[0210] Suitable scaffold polypeptides will in some cases be a half-life extending polypeptides. Thus, in some cases, a suitable scaffold polypeptide increases the in vivo half-life (e.g., the serum half-life) of the multimeric polypeptide, compared to a control multimeric polypeptide lacking the scaffold polypeptide. For example, in some cases, a scaffold polypeptide increases the in vivo half-life (e.g., the serum half-life) of the multimeric polypeptide, compared to a control multimeric polypeptide lacking the scaffold polypeptide, by at least about 10%, at least about 15%, at least about 20%, at least about 25%, at least about 50%, at least about 2-fold, at least about 2.5-fold, at least about 5-fold, at least about 10-fold, at least about 25-fold, at least about 50-fold, at least about 100-fold, or more than 100-fold. As an example, in some cases, an Fc polypeptide increases the in vivo half-life (e.g., the serum half-life) of the multimeric polypeptide, compared to a control multimeric polypeptide lacking the Fc polypeptide, by at least about 10%, at least about 15%, at least about 20%, at least about 25%, at least about 50%, at least about 2-fold, at least about 2.5-fold, at least about 5-fold, at least about 10-fold, at least about 25-fold, at least about 50-fold, at least about 100-fold, or more than 100-fold.

### Fc Polypeptides

[0211] In some cases, the first and/or the second polypeptide chain of a TMAPP of the present disclosure comprises an Fc polypeptide. The Fc polypeptide of a TMAPP of the present disclosure can be a human IgG1 Fc, a human IgG2 Fc, a human IgG3 Fc, a human IgG4 Fc, etc. In some cases, the Fc polypeptide comprises an amino acid sequence having at least about 70%, at least about 75%, at least about 80%, at least about 85%, at least about 90%, at least about 95%, at least about 98%, at least about 99%, or 100%, amino acid sequence identity to an amino acid sequence of an Fc region depicted in FIG. 21A-21G. In some cases, the Fc region comprises an amino acid sequence having at least about 70%, at least about 75%, at least about 80%, at least about 85%, at least about 90%, at least about 95%, at least about 98%, at least about 99%, or 100%, amino acid sequence identity to the human IgG1 Fc polypeptide depicted in FIG. 21A. In some cases, the Fc region comprises an amino acid sequence having at least about 70%, at least about 75%, at least about 80%, at least about 85%, at least about 90%, at least about 95%, at least about 98%, at least about 99%, or 100%, amino acid sequence identity to the human IgG1 Fc polypeptide depicted in FIG. 21A; and comprises a substitution of N77; e.g., the Fc polypeptide comprises an N77A substitution. In some cases, the Fc polypeptide comprises an amino acid sequence having at least about 70%, at least about 75%, at least about 80%, at least about 85%, at least about 90%, at least about 95%, at least about 98%, at least about 99%, or 100%, amino acid sequence identity to the human IgG2 Fc polypeptide depicted in FIG. 21A; e.g., the Fc polypeptide comprises an amino acid sequence having at least about 70%, at least about 75%, at least about 80%, at least about 85%, at least about 90%, at least about 95%, at least about 98%, at least about 99%, or 100%, amino acid sequence identity to amino acids 99-325 of the human IgG2 Fc polypeptide depicted in FIG. 21A. In some cases, the Fc polypeptide comprises an amino acid sequence having at least about 70%, at least about 75%, at least about 80%, at least about 85%, at least about 90%, at least about 95%, at least about 98%, at least about 99%, or 100%, amino acid sequence identity to the human IgG3 Fc polypeptide depicted in FIG. 21A; e.g., the Fc polypeptide comprises an amino acid sequence having at least about 70%, at least about 75%, at least about 80%, at least about 85%, at least about 90%, at least about 95%, at least about 98%, at least about 99%, or 100%, amino acid sequence identity to amino acids 19-246 of the human IgG3 Fc polypeptide depicted in FIG. 21A. In some cases, the Fc polypeptide comprises an amino acid sequence having at least about 70%, at least about 75%, at least about 80%, at least about 85%, at least about 90%, at least about 95%, at least about 98%, at least about 99%, or 100%, amino acid sequence identity to the human IgM Fc polypeptide depicted in FIG. 21B; e.g., the Fc polypeptide comprises an amino acid sequence having at least about 70%, at least about 75%, at least about 80%, at least about 85%, at least about 90%, at least about 95%, at least about 98%, at least about 99%, or 100%, amino acid sequence identity to amino acids 1-276 to the human IgM Fc polypeptide depicted in FIG. 21B. In some cases, the Fc polypeptide comprises an amino acid sequence having at least about 70%, at least about 75%, at least about 80%, at least about 85%, at least about 90%, at least about 95%, at least about 98%, at least about 99%, or 100%, amino acid sequence identity to the human IgA Fc polypeptide depicted in FIG. 21C; e.g., the Fc polypeptide comprises an amino acid sequence having at least about 70%, at least about 75%, at least about 80%, at least about 85%, at least about 90%, at least about 95%, at least about 98%, at least about 99%, or 100%, amino acid sequence identity to amino acids 1-234 to the human IgA Fc polypeptide depicted in FIG. 21C.

[0212] In some cases, the Fc polypeptide comprises an amino acid sequence having at least about 70%, at least about 75%, at least about 80%, at least about 85%, at least about 90%, at least about 95%, at least about 98%, at least about 99%, or 100%, amino acid sequence identity to the human IgG4 Fc polypeptide depicted in FIG. 21C. In some cases, the Fc polypeptide comprises an amino acid sequence having at least about 70%, at least about 75%, at least about 80%, at least about 85%, at least about 90%, at least about 95%, at least about 98%, at least about 99%, or 100%, amino acid sequence identity to amino acids 100 to 327 of the human IgG4 Fc polypeptide depicted in FIG. 21C.

[0213] In some cases the IgG4 polypeptide comprises the following amino acid sequence:

(SEQ ID NO: 60)
PPCPSCPAPEFLGGPSVFLFPPKPKDTLMISRTPEVTCVVVDVSQEDPE
VQFNWYVDGVEVHNAKTKPREEQFNSTYRVVSVLTVLHQDWLNGKEYKC
KVSNKGLPSSIEKTISKAKGQPREPQVYTLPPSQEEMTKNQVSLTCLVK
GFYPSDIAVEWESNGQPENNYKTTPPVLDSDGSFFLYSRLTVDKSRWQE
GNVFSCSVMHEALHNHYTQKSLSLSPG.

[0214] In some cases, the Fc polypeptide present in a TMAPP comprises the amino acid sequence depicted in FIG. 21A (human IgG1 Fc). In some cases, the Fc polypeptide present in a TMAPP comprises the amino acid sequence depicted in FIG. 21A (human IgG1 Fc), except for a substitution of N297 (N77 of the amino acid sequence depicted in FIG. 21A) with an amino acid other than asparagine. In some cases, the Fc polypeptide present in a TMAPP comprises the amino acid sequence depicted in FIG. 21C (human IgG1 Fc comprising an N297A substitution, which is N77 of the amino acid sequence depicted in FIG. 21A). In some cases, the Fc polypeptide present in a TMAPP comprises the amino acid sequence depicted in FIG. 21A (human IgG1 Fc), except for a substitution of L234 (L14 of the amino acid sequence depicted in FIG. 21A) with an amino acid other than leucine. In some cases, the Fc polypeptide present in a TMAPP comprises the amino acid sequence depicted in FIG. 21A (human IgG1 Fc), except for a substitution of L235 (L15 of the amino acid sequence depicted in FIG. 21A) with an amino acid other than leucine.

[0215] In some cases, the Fc polypeptide present in a TMAPP comprises the amino acid sequence depicted in FIG. 21E. In some cases, the Fc polypeptide present in a TMAPP comprises the amino acid sequence depicted in FIG. 21F. In some cases, the Fc polypeptide present in a TMAPP comprises the amino acid sequence depicted in FIG. 21G (human IgG1 Fc comprising an L234A substitution and an L235A substitution, corresponding to positions 14 and 15 of the amino acid sequence depicted in FIG. 21G). In some cases, the Fc polypeptide present in a TMAPP comprises the amino acid sequence depicted in FIG. 21A (human IgG1 Fc), except for a substitution of P331 (P111 of the amino acid sequence depicted in FIG. 21A) with an amino acid other than proline; in some cases, the substitution is a P331S substitution. In some cases, the Fc polypeptide present in a TMAPP comprises the amino acid sequence depicted in FIG. 21A (human IgG1 Fc), except for substitutions at L234 and L235 (L14 and L15 of the amino acid sequence depicted in FIG. 21A) with amino acids other than leucine. In some cases, the Fc polypeptide present in a TMAPP comprises the amino acid sequence depicted in FIG. 21A (human IgG1 Fc), except for substitutions at L234 and L235 (L14 and L15 of the amino acid sequence depicted in FIG. 21A) with amino acids other than leucine, and a substitution of P331 (P111 of the amino acid sequence depicted in FIG. 21A) with an amino acid other than proline. In some cases, the Fc polypeptide present in a TMAPP comprises the amino acid sequence depicted in FIG. 21E (human IgG1 Fc comprising L234F, L235E, and P331S substitutions (corresponding to amino acid positions 14, 15, and 111 of the amino acid sequence depicted in FIG. 21E). In some cases, the Fc polypeptide present in a TMAPP is an IgG1 Fc polypeptide that comprises L234A and L235A substitutions (substitutions of L14 and L15 of the amino acid sequence depicted in FIG. 21A with Ala), as depicted in FIG. 21G.

### Linkers

[0216] As noted above, a TMAPP of the present disclosure can include a linker peptide interposed between, e.g., an epitope and an MHC polypeptide; between an MHC polypeptide and an Ig Fc polypeptide; between a first MHC polypeptide and a second MHC polypeptide; etc.

[0217] Suitable linkers (also referred to as “spacers”) can be readily selected and can be of any of a number of suitable lengths, such as from 1 amino acid to 25 amino acids, from 3 amino acids to 20 amino acids, from 2 amino acids to 15 amino acids, from 3 amino acids to 12 amino acids, including 4 amino acids to 10 amino acids, 5 amino acids to 9 amino acids, 6 amino acids to 8 amino acids, or 7 amino acids to 8 amino acids. A suitable linker can be 1, 2, 3, 4, 5, 6, 7, 8, 9, 10, 11, 12, 13, 14, 15, 16, 17, 18, 19, 20, 21, 22, 23, 24, or 25 amino acids in length. A suitable linker can be from 25 to 35 amino acids in length. A suitable linker can be 25, 26, 27, 28, 29, 30, 31, 32, 33, 34, or 35 amino acids in length. A suitable linker can be from 35 to 45 amino acids in length. A suitable linker can be 35, 36, 37, 38, 39, 40, 41, 42, 43, 44, or 45 amino acids in length. A suitable linker can be from 45 to 50 amino acids in length. A suitable linker can be 45, 46, 47, 48, 49, or 50 amino acids in length.

[0218] Exemplary linkers include glycine polymers (G)ₙ, glycine-serine polymers (including, for example, (GS)ₙ, (GSGGS)ₙ (SEQ ID NO: 61) and (GGGS)ₙ (SEQ ID NO: 62), where n is an integer of at least one), glycine-alanine polymers, alanine-serine polymers, and other flexible linkers known in the art. Glycine and glycine-serine polymers can be used; both Gly and Ser are relatively unstructured, and therefore can serve as a neutral tether between components. Glycine polymers can be used; glycine accesses significantly more phi-psi space than even alanine, and is much less restricted than residues with longer side chains (see Scheraga, Rev. Computational Chem. 11173-142 (1992)). Exemplary linkers can comprise amino acid sequences including, but not limited to, GGSG (SEQ ID NO: 63), GGSGG (SEQ ID NO: 64), GSGSG (SEQ ID NO: 65), GSGGG (SEQ ID NO: 66), GGGSG (SEQ ID NO: 67), GSSSG (SEQ ID NO: 68), and the like. Exemplary linkers can include, e.g., Gly(Ser₄)n, (SEQ ID NO: 69) where n is 1, 2, 3, 4, 5, 6, 7, 8, 9, or 10. In some cases, a linker comprises the amino acid sequence (GSSSS)n (SEQ ID NO: 441), where n is 4. In some cases, a linker comprises the amino acid sequence (GSSSS)n (SEQ ID NO: 442), where n is 5. Exemplary linkers can include, e.g., (GlyGlyGlyGlySer)n (SEQ ID NO: 443), where n is 1, 2, 3, 4, 5, 6, 7, 8, 9, or 10. In some cases, a linker comprises the amino acid sequence (GGGGS)n (SEQ ID NO: 444), where n is 1. In some cases, a linker comprises the amino acid sequence (GGGGS)n (SEQ ID NO: 445), where n is 2. In some cases, a linker comprises the amino acid sequence (GGGGS)n (SEQ ID NO: 301), where n is 3. In some cases, a linker comprises the amino acid sequence (GGGGS)n (SEQ ID NO: 302), where n is 4. In some cases, a linker comprises the amino acid sequence (GGGGS)n (SEQ ID NO: 446), where n is 5. In some cases, a linker comprises the amino acid sequence (GGGGS)n (SEQ ID NO: 447), where n is 6. In some cases, a linker comprises the amino acid sequence (GGGGS)n (SEQ ID NO: 448), where n is 7. In some cases, a linker comprises the amino acid sequence (GGGGS)n (SEQ ID NO: 449), where n is 8. In some cases, a linker comprises the amino acid sequence (GGGGS)n (SEQ ID NO: 450), where n is 9. In some cases, a linker comprises the amino acid sequence (GGGGS)n (SEQ ID NO: 451), where n is 10. In some cases, a linker comprises the amino acid sequence AAAGG (SEQ ID NO: 70).

[0219] In some cases, a linker polypeptide present in a TMAPP of the present disclosure includes a cysteine residue that can form a disulfide bond with a cysteine residue present in a second polypeptide of the TMAPP. In some cases, for example, a suitable linker comprises the amino acid sequence GCGASGGGGSGGGGS (SEQ ID NO: 71).

### Epitope-Presenting Peptides

[0220] A peptide epitope (also referred to herein as a “peptide antigen” or “epitope-presenting peptide” or “epitope”) present in a TMAPP of the present disclosure presents an epitope to a TCR on the surface of a T cell. An epitope-presenting peptide can have a length of from about 4 amino acids to about 25 amino acids, e.g., the epitope can have a length of from 4 amino acids (aa) to 10 aa, from 10 aa to 15 aa, from 15 aa to 20 aa, or from 20 aa to 25 aa. For example, an epitope present in a TMAPP of the present disclosure can have a length of 4 amino acids (aa), 5 aa, 6 aa, 7, aa, 8 aa, 9 aa, 10 aa, 11 aa, 12 aa, 13 aa, 14 aa, 15 aa, 16 aa, 17 aa, 18 aa, 19 aa, 20 aa, 21 aa, 22 aa, 23 aa, 24 aa, or 25 aa. In some cases, an epitope-presenting peptide present in a TMAPP of the present disclosure has a length of from 5 amino acids to 10 amino acids, e.g., 5 aa, 6 aa, 7 aa, 8 aa, 9 aa, or 10 aa.

[0221] An epitope-presenting peptide present in a TMAPP of the present disclosure is specifically bound by a T-cell, i.e., the epitope is specifically bound by an epitope-specific T cell. An epitope-specific T cell binds an epitope-presenting peptide having a reference amino acid sequence, but does not substantially bind an epitope that differs from the reference amino acid sequence. For example, an epitope-specific T cell binds an epitope-presenting peptide having a reference amino acid sequence, and binds an epitope that differs from the reference amino acid sequence, if at all, with an affinity that is less than 10⁻⁶ M, less than 10⁻⁵ M, or less than 10⁻⁴ M. An epitope-specific T cell can bind an epitope-presenting peptide for which it is specific with an affinity of at least 10⁻⁷ M, at least 10⁻⁸ M, at least 10⁻⁹ M, or at least 10⁻¹⁰ M.

[0222] Suitable epitope-presenting peptides include, but are not limited to, epitope-presenting peptides that are associated with or present in a “self” antigen (an autoantigen).

[0223] Antigens associated with type 1 diabetes (T1D) include, e.g., preproinsulin, proinsulin, insulin, insulin B chain, insulin A chain, 65 kDa isoform of glutamic acid decarboxylase (GAD65), 67 kDa isoform of glutamic acid decarboxylase (GAD67), tyrosine phosphatase (IA-2), heat-shock protein HSP65, islet-specific glucose6-phosphatase catalytic subunit related protein (IGRP), islet antigen 2 (IA2), and zinc transporter (ZnT8). See, e.g., Mallone et al. (2011) Clin. Dev. Immunol. 2011:513210; and U.S. Patent Publication No. 2017/0045529. An antigen “associated with” a particular autoimmune disorder is an antigen that is a target of autoantibodies and/or autoreactive T cells present in individuals with that autoimmune disorder, where such autoantibodies and/or autoreactive T cells mediate a pathological state associated with the autoimmune disorder. A suitable epitope-presenting peptide for inclusion in an antigen-presenting polypeptide of the present disclosure can be an epitope-presenting peptide of from 4 amino acids to about 25 amino acids in length of any one of the aforementioned T1D-associated antigens. As one non-limiting example, an epitope-presenting peptide is proinsulin 73-90 (GAGSLQPLALEGSLQKR; SEQ ID NO: 72). As another non-limiting example, an epitope-presenting peptide is the following insulin (InsA (1-15) peptide: GIVDQCCTSICSLYQ (SEQ ID NO: 73). As another non-limiting example, an epitope-presenting peptide is the following insulin (InsA(1-15; D4E) peptide: GIVEQCCTSICSLYQ (SEQ ID NO: 74). As another non-limiting example, an epitope-presenting peptide is the following GAD65 (555-567) peptide; NFFRMVISNPAAT (SEQ ID NO: 75). As another non-limiting example, an epitope-presenting peptide is the following GAD65 (555-567; F557I) peptide; NFIRMVISNPAAT (SEQ ID NO: 76). As another non-limiting example, an epitope-presenting peptide is the following islet antigen 2 (IA2) peptide: SFYLKNVQTQETRTLTQFHF (SEQ ID NO: 77). As another non-limiting example, an epitope-presenting peptide is the following proinsulin peptide: SLQPLALEGSLQSRG (SEQ ID NO: 78).

[0224] In some cases, the epitope-presenting peptide comprises from 4 to 25 contiguous amino acids of an amino acid sequence having at least 90%, at least 95%, at least 98%, at least 99%, or 100%, amino acid sequence identity to amino acids 25-110 of the following human preproinsulin amino acid sequence (wherein amino acids 1-24 (underlined) is a signal peptide):

(SEQ ID NO: 433)
MALWMRLLPL LALLALWGPD PAAAFVNQHL CGSHLVEALY
LVCGERGFFY TPKTRREAED LQVGQVELGG GPGAGSLQPL
ALEGSLQKRG IVEQCCTSIC SLYQLENYCN;

where the epitope-presenting peptide has a length of 4 amino acids (aa), 5 aa, 6 aa, 7, aa, 8 aa, 9 aa, 10 aa, 11 aa, 12 aa, 13 aa, 14 aa, 15 aa, 16 aa, 17 aa, 18 aa, 19 aa, 20 aa, 21 aa, 22 aa, 23 aa, 24 aa, or 25 aa. In some cases, the epitope-presenting peptide has the amino acid sequence: GAGSLQPLALEGSLQKRG (SEQ ID NO:434). In some cases, the epitope-presenting peptide has the amino acid sequence: SLQPLALEGSLQKRG (SEQ ID NO:435). In some cases, the epitope-presenting peptide has the amino acid sequence: SLQPLALEGSLQSRG (SEQ ID NO:78). In some cases, the epitope-presenting peptide has the amino acid sequence: QPLALEGSLQKRG (SEQ ID NO:436). In some cases, the epitope-presenting peptide has the amino acid sequence: QPLALEGSLQSRG (SEQ ID NO:437).

[0225] Antigens associated with celiac disease include, e.g., tissue transglutaminase and gliadin. A suitable epitope-presenting peptide for inclusion in a TMAPP of the present disclosure can be an epitope-presenting peptide of from 4 amino acids to about 25 amino acids in length of any one of the aforementioned celiac-associated antigens. Other antigens associated with celiac disease include, e.g., secalins, hordeins, avenins, and glutenins. Examples of secalins include rye secalins. Examples of hordeins include barley hordeins. Examples of glutenins include wheat glutenins. See, e.g., U.S. 2016/0279233.

[0226] For example, a suitable celiac-associated peptide is in some cases a peptide of from about 4 to about 25 contiguous amino acids of a polypeptide comprising an amino acid sequence having at least at least about 80%, at least about 85%, at least about 90%, at least about 95%, at least about 98%, at least about 99%, or 100%, amino acid sequence identity to the following gamma-gliadin amino acid sequence:

[0227] MKTLLILTIL AMATTIATAN MQVDPSGQVQ WPQQQPFPQP QQPFCEQPQR TIPQPHQTFH HQPQQTFPQP EQTYPHQPQQ QFPQTQQPQQ PFPQPQQTFP QQPQLPFPQQ PQQPFPQPQQ PQQPFPQSQQ PQQPFPQPQQ QFPQPQQPQQ SFPQQQQPLI QPYLQQQMNP CKNYLLQQCN PVSLVSSLVS MILPRSDCKV MRQQCCQQLA QIPQQLQCAA IHGIVHSIIM QQEQQQQQQQ QQQQQQQQGI QIMRPLFQLV QGQGIIQPQQ PAQLEVIRSL VLGTLPTMCN VFVPPECSTT KAPFASIVAD IGGQ (SEQ ID NO: 79). In some cases, the epitope is a Glia-α9 epitope. Glia-α9 is a major (immunodominant) epitope that is recognized by the majority of celiac disease (CD) patients. Glia-α9 epitopes include, e.g., QPFPQPQ (SEQ ID NO: 80); and PFPQPQLPY (SEQ ID NO: 81), which when selectively deamidated by transglutaminase 2 and presented by HLA-DQ2 as the amino-acid sequence PFPQPELPY (SEQ ID NO: 82) induces potent T-cell responses.

[0228] In some cases, the epitope presenting peptide comprises a sequence selected from: QLQPFPQPELPY (SEQ ID NO: 83; a gliadin alphala peptide) or its modified counterpart LQPFPQPELPY (SEQ ID NO: 84), PQPELPYPQPE (SEQ ID NO: 85; a gliadin alpha 2 peptide), and QPFPQPEQPFPW (SEQ ID NO: 86; a gliadin omega peptide).

[0229] In some cases, the gliadin epitope presenting peptide is modified for expression enhancement and comprises a sequence selected from: ADAQLQPFPQPELPY (SEQ ID NO: 87), ADALQPFPQPELPY (SEQ ID NO: 88), ADAQPFPQPELPY (SEQ ID NO: 89), ADAPFPQPELPY (SEQ ID NO: 90), QLQIFPQPELPY (SEQ ID NO: 91), QLQPFPEPELPY (SEQ ID NO: 92), QLQPFPQPEEPY (SEQ ID NO: 93), QLQIFPEPEEPY (SEQ ID NO: 94), QPQPELPYPQPE (SEQ ID NO: 95), ADAQPQPELPYPQPE (SEQ ID NO: 96), ADAPQPELPYPQPE (SEQ ID NO: 97), IQPELPYPQPE (SEQ ID NO: 98), PQPELPEPQPE (SEQ ID NO: 99), and IQPELPEPQPE (SEQ ID NO: 100).

[0230] In some cases, the gliadin epitope presenting peptide is modified for expression enhancement and contains a cysteine for anchoring the peptide in the binding groove. In an embodiment, the peptide comprises the alpha 1a gliadin peptide sequence QLQPFPQPCLPY (SEQ ID NO: 101), and in another embodiment the alpha 2 gliadin peptide sequence PQPELCYPQPE (SEQ ID NO: 102).

### Immunomodulatory Polypeptides (“MODs”)

[0231] Immunomodulatory polypeptides that are suitable for inclusion in a TMAPP of the present disclosure include, but are not limited to, IL-2, CD7, B7-1 (CD80), B7-2 (CD86), PD-L1, PD-L2, 4-1BBL, OX40L, Fas ligand (FasL), inducible costimulatory ligand (ICOS-L), intercellular adhesion molecule (ICAM), CD30L, CD40, CD70, CD83, HLA-G, MICA, MICB, HVEM, lymphotoxin beta receptor, 3/TR6, ILT3, ILT4, and HVEM.

[0232] In some cases, the immunomodulatory polypeptide is selected from a 4-1BBL polypeptide, a B7-1 polypeptide; a B7-2 polypeptide, an ICOS-L polypeptide, an OX-40L polypeptide, a CD80 polypeptide, a CD86 polypeptide, a PD-L1 polypeptide, a FasL polypeptide, a TGFβ polypeptide, and a PD-L2 polypeptide. The immunomodulatory polypeptide can comprise only the extracellular portion of a full-length immunomodulatory polypeptide. Thus, for example, the immunomodulatory polypeptide can in some cases exclude one or more of a signal peptide, a transmembrane domain, and an intracellular domain normally found in a naturally-occurring immunomodulatory polypeptide.

[0233] In some cases, an immunomodulatory polypeptide suitable for inclusion in a TMAPP of the present disclosure comprises all or a portion of (e.g., an extracellular portion of) the amino acid sequence of a naturally-occurring immunomodulatory polypeptide. In other instances, an immunomodulatory polypeptide suitable for inclusion in a TMAPP of the present disclosure is a variant immunomodulatory polypeptide that comprises at least one amino acid substitution compared to the amino acid sequence of a naturally-occurring immunomodulatory polypeptide. In some instances, a variant immunomodulatory polypeptide exhibits a binding affinity for a co-immunomodulatory polypeptide that is lower than the affinity of a corresponding naturally-occurring immunomodulatory polypeptide (e.g., an immunomodulatory polypeptide not comprising the amino acid substitution(s) present in the variant) for the co-immunomodulatory polypeptide.

Variant Immunomodulatory Polypeptides with Reduced Affinity

[0234] Suitable immunomodulatory domains that exhibit reduced affinity for a co-immunomodulatory domain can have from 1 amino acid (aa) to 20 aa differences from a wild-type immunomodulatory domain. For example, in some cases, a variant immunomodulatory polypeptide present in a TMAPP of the present disclosure differs in amino acid sequence by 1 aa, 2 aa, 3 aa, 4 aa, 5 aa, 6 aa, 7 aa, 8 aa, 9 aa, or 10 aa, from a corresponding wild-type immunomodulatory polypeptide. As another example, in some cases, a variant immunomodulatory polypeptide present in a TMAPP of the present disclosure differs in amino acid sequence by 11 aa, 12 aa, 13 aa, 14 aa, 15 aa, 16 aa, 17 aa, 18 aa, 19 aa, or 20 aa, from a corresponding wild-type immunomodulatory polypeptide. As an example, in some cases, a variant immunomodulatory polypeptide present in a TMAPP of the present disclosure includes 1, 2, 3, 4, 5, 6, 7, 8, 9, or 10 amino acid substitutions, compared to a corresponding reference (e.g., wild-type) immunomodulatory polypeptide. In some cases, a variant immunomodulatory polypeptide present in a TMAPP of the present disclosure includes a single amino acid substitution compared to a corresponding reference (e.g., wild-type) immunomodulatory polypeptide. In some cases, a variant immunomodulatory polypeptide present in a TMAPP of the present disclosure includes 2 amino acid substitutions (e.g., no more than 2 amino acid substitutions) compared to a corresponding reference (e.g., wild-type) immunomodulatory polypeptide. In some cases, a variant immunomodulatory polypeptide present in a TMAPP of the present disclosure includes 3 amino acid substitutions (e.g., no more than 3 amino acid substitutions) compared to a corresponding reference (e.g., wild-type) immunomodulatory polypeptide. In some cases, a variant immunomodulatory polypeptide present in a TMAPP of the present disclosure includes 4 amino acid substitutions (e.g., no more than 4 amino acid substitutions) compared to a corresponding reference (e.g., wild-type) immunomodulatory polypeptide. In some cases, a variant immunomodulatory polypeptide present in a TMAPP of the present disclosure includes 5 amino acid substitutions (e.g., no more than 5 amino acid substitutions) compared to a corresponding reference (e.g., wild-type) immunomodulatory polypeptide. In some cases, a variant immunomodulatory polypeptide present in a TMAPP of the present disclosure includes 6 amino acid substitutions (e.g., no more than 6 amino acid substitutions) compared to a corresponding reference (e.g., wild-type) immunomodulatory polypeptide. In some cases, a variant immunomodulatory polypeptide present in a TMAPP of the present disclosure includes 7 amino acid substitutions (e.g., no more than 7 amino acid substitutions) compared to a corresponding reference (e.g., wild-type) immunomodulatory polypeptide. In some cases, a variant immunomodulatory polypeptide present in a TMAPP of the present disclosure includes 8 amino acid substitutions (e.g., no more than 8 amino acid substitutions) compared to a corresponding reference (e.g., wild-type) immunomodulatory polypeptide. In some cases, a variant immunomodulatory polypeptide present in a TMAPP of the present disclosure includes 9 amino acid substitutions (e.g., no more than 9 amino acid substitutions) compared to a corresponding reference (e.g., wild-type) immunomodulatory polypeptide. In some cases, a variant immunomodulatory polypeptide present in a TMAPP of the present disclosure includes 10 amino acid substitutions (e.g., no more than 10 amino acid substitutions) compared to a corresponding reference (e.g., wild-type) immunomodulatory polypeptide.

[0235] In some cases, a variant immunomodulatory polypeptide present in a TMAPP of the present disclosure includes 11 amino acid substitutions (e.g., no more than 11 amino acid substitutions) compared to a corresponding reference (e.g., wild-type) immunomodulatory polypeptide. In some cases, a variant immunomodulatory polypeptide present in a TMAPP of the present disclosure includes 12 amino acid substitutions (e.g., no more than 12 amino acid substitutions) compared to a corresponding reference (e.g., wild-type) immunomodulatory polypeptide. In some cases, a variant immunomodulatory polypeptide present in a TMAPP of the present disclosure includes 13 amino acid substitutions (e.g., no more than 13 amino acid substitutions) compared to a corresponding reference (e.g., wild-type) immunomodulatory polypeptide. In some cases, a variant immunomodulatory polypeptide present in a TMAPP of the present disclosure includes 14 amino acid substitutions (e.g., no more than 14 amino acid substitutions) compared to a corresponding reference (e.g., wild-type) immunomodulatory polypeptide. In some cases, a variant immunomodulatory polypeptide present in a TMAPP of the present disclosure includes 15 amino acid substitutions (e.g., no more than 15 amino acid substitutions) compared to a corresponding reference (e.g., wild-type) immunomodulatory polypeptide. In some cases, a variant immunomodulatory polypeptide present in a TMAPP of the present disclosure includes 16 amino acid substitutions (e.g., no more than 16 amino acid substitutions) compared to a corresponding reference (e.g., wild-type) immunomodulatory polypeptide. In some cases, a variant immunomodulatory polypeptide present in a TMAPP of the present disclosure includes 17 amino acid substitutions (e.g., no more than 17 amino acid substitutions) compared to a corresponding reference (e.g., wild-type) immunomodulatory polypeptide. In some cases, a variant immunomodulatory polypeptide present in a TMAPP of the present disclosure includes 18 amino acid substitutions (e.g., no more than 18 amino acid substitutions) compared to a corresponding reference (e.g., wild-type) immunomodulatory polypeptide. In some cases, a variant immunomodulatory polypeptide present in a TMAPP of the present disclosure includes 19 amino acid substitutions (e.g., no more than 19 amino acid substitutions) compared to a corresponding reference (e.g., wild-type) immunomodulatory polypeptide. In some cases, a variant immunomodulatory polypeptide present in a TMAPP of the present disclosure includes 20 amino acid substitutions (e.g., no more than 20 amino acid substitutions) compared to a corresponding reference (e.g., wild-type) immunomodulatory polypeptide.

[0236] As discussed above, a variant immunomodulatory polypeptide suitable for inclusion in a TMAPP of the present disclosure exhibits reduced affinity for a cognate co-immunomodulatory polypeptide, compared to the affinity of a corresponding wild-type immunomodulatory polypeptide for the cognate co-immunomodulatory polypeptide.

[0237] Exemplary pairs of immunomodulatory polypeptide and cognate co-immunomodulatory polypeptide include, but are not limited to:

[0238] a) 4-1BBL (immunomodulatory polypeptide) and 4-1BB (cognate co-immunomodulatory polypeptide);

[0239] b) PD-L1 (immunomodulatory polypeptide) and PD1 (cognate co-immunomodulatory polypeptide);

[0240] c) IL-2 (immunomodulatory polypeptide) and IL-2 receptor (cognate co-immunomodulatory polypeptide);

[0241] d) CD80 (immunomodulatory polypeptide) and CD28 (cognate co-immunomodulatory polypeptide);

[0242] e) CD86 (immunomodulatory polypeptide) and CD28 (cognate co-immunomodulatory polypeptide);

[0243] f) OX40L (CD252) (immunomodulatory polypeptide) and OX40 (CD134) (cognate co-immunomodulatory polypeptide);

[0244] g) Fas ligand (immunomodulatory polypeptide) and Fas (cognate co-immunomodulatory polypeptide);

[0245] h) ICOS-L (immunomodulatory polypeptide) and ICOS (cognate co-immunomodulatory polypeptide);

[0246] i) ICAM (immunomodulatory polypeptide) and LFA-1 (cognate co-immunomodulatory polypeptide);

[0247] j) CD30L (immunomodulatory polypeptide) and CD30 (cognate co-immunomodulatory polypeptide);

[0248] k) CD40 (immunomodulatory polypeptide) and CD40L (cognate co-immunomodulatory polypeptide);

[0249] 1) CD83 (immunomodulatory polypeptide) and CD83L (cognate co-immunomodulatory polypeptide);

[0250] m) HVEM (CD270) (immunomodulatory polypeptide) and CD160 (cognate co-immunomodulatory polypeptide);

[0251] n) JAG1 (CD339) (immunomodulatory polypeptide) and Notch (cognate co-immunomodulatory polypeptide);

[0252] o) JAG1 (immunomodulatory polypeptide) and CD46 (cognate co-immunomodulatory polypeptide);

[0253] p) CD80 (immunomodulatory polypeptide) and CTLA4 (cognate co-immunomodulatory polypeptide);

[0254] q) CD86 (immunomodulatory polypeptide) and CTLA4 (cognate co-immunomodulatory polypeptide); and

[0255] r) CD70 (immunomodulatory polypeptide) and CD27 (cognate co-immunomodulatory polypeptide).

[0256] In some cases, a variant immunomodulatory polypeptide present in a TMAPP of the present disclosure has a binding affinity for a cognate co-immunomodulatory polypeptide that is from 100 nM to 100 μM. For example, in some cases, a variant immunomodulatory polypeptide present in a TMAPP of the present disclosure has a binding affinity for a cognate co-immunomodulatory polypeptide that is from about 100 nM to 150 nM, from about 150 nM to about 200 nM, from about 200 nM to about 250 nM, from about 250 nM to about 300 nM, from about 300 nM to about 350 nM, from about 350 nM to about 400 nM, from about 400 nM to about 500 nM, from about 500 nM to about 600 nM, from about 600 nM to about 700 nM, from about 700 nM to about 800 nM, from about 800 nM to about 900 nM, from about 900 nM to about 1 μM, to about 1 μM to about 5 μM, from about 5 μM to about 10 μM, from about 10 μM to about 15 μM, from about 15 μM to about 20 μM, from about 20 μM to about 25 μM, from about 25 μM to about 50 μM, from about 50 μM to about 75 μM, or from about 75 μM to about 100 μM.

### Determining Binding Affinity

[0257] Binding affinity between an immunomodulatory polypeptide and its cognate co-immunomodulatory polypeptide can be determined by bio-layer interferometry (BLI) using purified immunomodulatory polypeptide and purified cognate co-immunomodulatory polypeptide. Binding affinity between a TMAPP and its cognate co-immunomodulatory polypeptide can also be determined by BLI using purified TMAPP and the cognate co-immunomodulatory polypeptide. BLI methods are well known to those skilled in the art. See, e.g., Lad et al. (2015) J. Biomol. Screen. 20(4):498-507; and Shah and Duncan (2014) J. Vis. Exp. 18:e51383. The specific and relative binding affinities described in this disclosure between an immunomodulatory polypeptide and its cognate co-immunomodulatory polypeptide, or between a synTac and its cognate co-immunomodulatory polypeptide, can be determined using the following procedures.

[0258] To determine binding affinity between a TMAPP and its cognate co-immunomodulatory polypeptide, a BLI assay can be carried out using an Octet RED 96 (Pal FortéBio) instrument, or a similar instrument, as follows. A TMAPP (e.g., a TMAPP of the present disclosure; a control TMAPP (where a control TMAPP comprises a wild-type immunomodulatory polypeptide)) is immobilized onto an insoluble support (a “biosensor”). The immobilized TMAPP is the “target.” Immobilization can be effected by immobilizing a capture antibody onto the insoluble support, where the capture antibody immobilizes the TMAPP. For example, immobilization can be effected by immobilizing anti-Fc (e.g., anti-human IgG Fc) antibodies onto the insoluble support, where the immobilized anti-Fc antibodies bind to and immobilize the TMAPP (where the TMAPP comprises an IgFc polypeptide). A co-immunomodulatory polypeptide is applied, at several different concentrations, to the immobilized TMAPP, and the instrument's response recorded. Assays are conducted in a liquid medium comprising 25 mM HEPES pH 6.8, 5% poly(ethylene glycol) 6000, 50 mM KCl, 0.1% bovine serum albumin, and 0.02% Tween 20 nonionic detergent. Binding of the co-immunomodulatory polypeptide to the immobilized TMAPP is conducted at 30° C. As a positive control for binding affinity, an anti-MHC Class II monoclonal antibody can be used. For example, an anti-HLD-DR3 monoclonal antibody such as the 16-23 antibody (Sigma; also referred to as “16.23”; see, e.g., Pious et al. (1985) J. Exp. Med. 162:1193; Mellins et al. (1991)J. Exp. Med. 174:1607; ECACC hybridoma collection 16-23, ECACC 99043001) can be used as a positive control for binding affinity. As another example, a pan-HLA Class II antibody, such as the HKB1 antibody (Immunotools; Holte et al. (1989) Eur. J. Immunol. 19:1221) can be used as a positive control for binding affinity. A standard curve can be generated using serial dilutions of the anti-MHC Class II monoclonal antibody. The co-immunomodulatory polypeptide, or the anti-MHC Class II mAb, is the “analyte.” BLI analyzes the interference pattern of white light reflected from two surfaces: i) from the immobilized polypeptide (“target”); and ii) an internal reference layer. A change in the number of molecules (“analyte”; e.g., co-immunomodulatory polypeptide; anti-HLA antibody) bound to the biosensor tip causes a shift in the interference pattern; this shift in interference pattern can be measured in real time. The two kinetic terms that describe the affinity of the target/analyte interaction are the association constant (kₐ) and dissociation constant (k_{d}). The ratio of these two terms (k_{d/a}) gives rise to the affinity constant K_{D}.

[0259] As noted above, determining binding affinity between an immunomodulatory polypeptide (e.g., IL-2 or an IL-2 variant) and its cognate co-immunomodulatory polypeptide (e.g., IL-2R) also can be determined by BLI. The assay is similar to that described above for the TMAPP. A BLI assay can be carried out using an Octet RED 96 (Pal FortéBio) instrument, or a similar instrument, as follows. A component immunomodulatory polypeptide of a TMAPP of the present disclosure (e.g., a variant IL-2 polypeptide of the present disclosure); and a control immunomodulatory polypeptide (where a control immunomodulatory polypeptide comprises a wild-type immunomodulatory polypeptide, e.g. wild-type IL-2)) are immobilized onto an insoluble support (a “biosensor”). The immunomodulatory polypeptide is the “target.” Immobilization can be effected by immobilizing a capture antibody onto the insoluble support, where the capture antibody immobilizes the immunomodulatory polypeptide. For example, if the target is fused to an immuno-affinity tag (e.g. FLAG, human IgG Fc) immobilization can be effected by immobilizing with the appropriate antibody to the immuno-affinity tag (e.g. anti-human IgG Fc) onto the insoluble support, where the immobilized antibodies bind to and immobilize the immunomodulatory polypeptide (where the immunomodulatory polypeptide comprises an IgFc polypeptide). A co-immunomodulatory polypeptide (or polypeptides) is applied, at several different concentrations, to the immobilized immunomodulatory polypeptide, and the instrument's response recorded. Alternatively, a co-immunomodulatory polypeptide (or polypeptides) is immobilized to the biosensor (e.g., for the IL-2 receptor heterotrimer, as a monomeric subunit, heterodimeric subcomplex, or the complete heterotrimer) and the immunomodulatory polypeptide is applied, at several different concentrations, to the immobilized coimmunomodulatory polypeptide(s), and the instrument's response is recorded. Assays are conducted in a liquid medium comprising 25 mM HEPES pH 6.8, 5% poly(ethylene glycol) 6000, 50 mM KCl, 0.1% bovine serum albumin, and 0.02% Tween 20 nonionic detergent. Binding of the co-immunomodulatory polypeptide to the immobilized immunomodulatory polypeptide is conducted at 30° C. BLI analyzes the interference pattern of white light reflected from two surfaces: i) from the immobilized polypeptide (“target”); and ii) an internal reference layer. A change in the number of molecules (“analyte”; e.g., co-immunomodulatory polypeptide) bound to the biosensor tip causes a shift in the interference pattern; this shift in interference pattern can be measured in real time. The two kinetic terms that describe the affinity of the target/analyte interaction are the association constant (kₐ) and dissociation constant (k_{d}). The ratio of these two terms (k_{d/a}) gives rise to the affinity constant K_{D}. Determining the binding affinity of both a wild-type immunomodulatory polypeptide (e.g., IL-2) for its receptor (e.g., IL-2R) and a variant immunomodulatory polypeptide (e.g., an IL-2 variant as disclosed herein) for its cognate co-immunomodulatory polypeptide (e.g., its receptor) (e.g., IL-2R) thus allows one to determine the relative binding affinity of the variant co-immunomodulatory polypeptide, as compared to the wild-type co-immunomodulatory polypeptide, for the cognate co-immunomodulatory polypeptide. That is, one can determine whether the binding affinity of a variant immunomodulatory polypeptide for its receptor (its cognate co-immunomodulatory polypeptide) is reduced as compared to the binding affinity of the wild-type immunomodulatory polypeptide for the same cognate co-immunomodulatory polypeptide, and, if so, what is the percentage reduction from the binding affinity of the wild-type co-immunomodulatory polypeptide.

[0260] The BLI assay is carried out in a multi-well plate. To run the assay, the plate layout is defined, the assay steps are defined, and biosensors are assigned in Octet Data Acquisition software. The biosensor assembly is hydrated. The hydrated biosensor assembly and the assay plate are equilibrated for 10 minutes on the Octet instrument. Once the data are acquired, the acquired data are loaded into the Octet Data Analysis software. The data are processed in the Processing window by specifying method for reference subtraction, y-axis alignment, inter-step correction, and Savitzky-Golay filtering. Data are analyzed in the Analysis window by specifying steps to analyze (Association and Dissociation), selecting curve fit model (1:1), fitting method (global), and window of interest (in seconds). The quality of fit is evaluated. K_{D} values for each data trace (analyte concentration) can be averaged if within a 3-fold range. K_{D} error values should be within one order of magnitude of the affinity constant values; R² values should be above 0.95. See, e.g., Abdiche et al. (2008) J. Anal. Biochem. 377:209.

[0261] In some cases, the ratio of: i) the binding affinity of a control TMAPP (where the control TMAPP comprises a wild-type immunomodulatory polypeptide) to a cognate co-immunomodulatory polypeptide to ii) the binding affinity of a TMAPP of the present disclosure comprising a variant of the wild-type immunomodulatory polypeptide to the cognate co-immunomodulatory polypeptide, when measured by BLI (as described above), is at least 1.5:1, at least 2:1, at least 5:1, at least 10:1, at least 15:1, at least 20:1, at least 25:1, at least 50:1, at least 100:1, at least 500:1, at least 102:1, at least 5×10²:1, at least 10³:1, at least 5×10³:1, at least 10⁴:1, at least 10⁵:1, or at least 10⁶:1. In some cases, the ratio of: i) the binding affinity of a control TMAPP (where the control TMAPP comprises a wild-type immunomodulatory polypeptide) to a cognate co-immunomodulatory polypeptide to ii) the binding affinity of a TMAPP of the present disclosure comprising a variant of the wild-type immunomodulatory polypeptide to the cognate co-immunomodulatory polypeptide, when measured by BLI, is in a range of from 1.5:1 to 10⁶:1, e.g., from 1.5:1 to 10:1, from 10:1 to 50:1, from 50:1 to 10²:1, from 10²:1 to 10³:1, from 10³:1 to 10⁴:1, from 10⁴:1 to 10⁵:1, or from 10⁵:1 to 10⁶:1.

[0262] The epitope present in a TMAPP of the present disclosure binds to a T-cell receptor (TCR) on a T cell with an affinity of at least 100 μM (e.g., at least 10 μM, at least 1 μM, at least 100 nM, at least 10 nM, or at least 1 nM). In some cases, the epitope present in a TMAPP of the present disclosure binds to a TCR on a T cell with an affinity of from about 10⁻⁴ M to about 5×10⁴ M, from about 5×10⁴ M to about 10⁻⁵ M, from about 10⁻⁵ M to 5×10⁻⁵ M, from about 5×10⁻⁵ M to 10⁻⁶ M, from about 10⁻⁶ M to about 5×10⁻⁶ M, from about 5×10⁻⁶ M to about 10⁻⁷ M, from about 10⁻⁷ M to about 5×10⁻⁷ M, from about 5×10⁻⁷ M to about 10⁻⁸ M, or from about 10⁻⁸ M to about 10⁻⁹ M. Expressed another way, in some cases, the epitope present in a TMAPP of the present disclosure binds to a TCR on a T cell with an affinity of from about 1 nM to about 5 nM, from about 5 nM to about 10 nM, from about 10 nM to about 50 nM, from about 50 nM to about 100 nM, from about 0.1 μM to about 0.5 μM, from about 0.5 μM to about 1 μM, from about 1 μM to about 5 μM, from about 5 μM to about 10 μM, from about 10 μM to about 25 μM, from about 25 μM to about 50 μM, from about 50 μM to about 75 μM, from about 75 μM to about 100 μM.

[0263] In some cases, a variant immunomodulatory polypeptide present in a TMAPP of the present disclosure has a binding affinity for a cognate co-immunomodulatory polypeptide that is from 1 nM to 100 nM, or from 100 nM to 100 μM. For example, in some cases, a variant immunomodulatory polypeptide present in a TMAPP of the present disclosure has a binding affinity for a cognate co-immunomodulatory polypeptide that is from about 100 nM to 150 nM, from about 150 nM to about 200 nM, from about 200 nM to about 250 nM, from about 250 nM to about 300 nM, from about 300 nM to about 350 nM, from about 350 nM to about 400 nM, from about 400 nM to about 500 nM, from about 500 nM to about 600 nM, from about 600 nM to about 700 nM, from about 700 nM to about 800 nM, from about 800 nM to about 900 nM, from about 900 nM to about 1 μM, to about 1 μM to about 5 μM, from about 5 μM to about 10 M, from about 10 μM to about 15 μM, from about 15 μM to about 20 μM, from about 20 μM to about 25 μM, from about 25 μM to about 50 μM, from about 50 μM to about 75 μM, or from about 75 μM to about 100 μM. In some cases, a variant immunomodulatory polypeptide present in a TMAPP of the present disclosure has a binding affinity for a cognate co-immunomodulatory polypeptide that is from about 1 nM to about 5 nM, from about 5 nM to about 10 nM, from about 10 nM to about 50 nM, from about 50 nM to about 100 nM.

PD-L1 variants

[0264] As one non-limiting example, in some cases, a variant immunomodulatory polypeptide present in a TMAPP of the present disclosure is a variant PD-L1 polypeptide. Wild-type PD-L1 binds to PD1.

[0265] A wild-type human PD-L1 polypeptide can comprise the following amino acid sequence: MRIFAVFIFM TYWHLLNAFT VTVPKDLYVV EYGSNMTIEC KFPVEKQLDL AALIVYWEME DKNIIQFVHG EEDLKVQHSS YRQRARLLKD QLSLGNAALQ ITDVKLQDAG VYRCMISYGG ADYKRITVKV NAPYNKINQR ILVVDPVTSE HELTCQAEGY PKAEVIWTSS DHQVLSGKTT TTNSKREEKL FNVTSTLRIN TTTNEIFYCT FRRLDPEENH TAELVIPGNI LNVSIKICLT LSPST (SEQ ID NO: 103).

[0266] A wild-type human PD-L1 ectodomain can comprise the following amino acid sequence: FT VTVPKDLYVV EYGSNMTIEC KFPVEKQLDL AALIVYWEME DKNIIQFVHG EEDLKVQHSS YRQRARLLKD QLSLGNAALQ ITDVKLQDAG VYRCMISYGG ADYKRITVKV NAPYNKINQR ILVVDPVTSE HELTCQAEGY PKAEVIWTSS DHQVLSGKTT TTNSKREEKL FNVTSTLRIN TTTNEIFYCT FRRLDPEENH TAELVIPGNI LNVSIKI (SEQ ID NO: 104).

[0267] A wild-type PD-1 polypeptide can comprise the following amino acid sequence: PGWFLDSPDR PWNPPTFSPA LLVVTEGDNA TFTCSFSNTS ESFVLNWYRM SPSNQTDKLA AFPEDRSQPG QDCRFRVTQL PNGRDFHMSV VRARRNDSGT YLCGAISLAP KAQIKESLRA ELRVTERRAE VPTAHPSPSP RPAGQFQTLV VGVVGGLLGS LVLLVWVLAV ICSRAARGTI GARRTGQPLK EDPSAVPVFS VDYGELDFQW REKTPEPPVP CVPEQTEYAT IVFPSGMGTS SPARRGSADG PRSAQPLRPE DGHCSWPL (SEQ ID NO: 105).

[0268] In some cases, a variant PD-L1 polypeptide exhibits reduced binding affinity to PD-1 (e.g., a PD-1 polypeptide comprising the amino acid sequence set forth in SEQ ID NO: 105), compared to the binding affinity of a PD-L1 polypeptide comprising the amino acid sequence set forth in SEQ ID NO: 103 or SEQ ID NO: 104. For example, in some cases, a variant PD-L1 polypeptide of the present disclosure binds PD-1 (e.g., a PD-1 polypeptide comprising the amino acid sequence set forth in SEQ ID NO: 105) with a binding affinity that is at least 10% less, at least 15% less, at least 20% less, at least 25% less, at least 30% less, at least 35% less, at least 40% less, at least 45% less, at least 50% less, at least 55% less, at least 60% less, at least 65% less, at least 70% less, at least 75% less, at least 80% less, at least 85% less, at least 90% less, at least 95% less, or more than 95% less, than the binding affinity of a PD-L1 polypeptide comprising the amino acid sequence set forth in SEQ ID NO: 103 or SEQ ID NO: 104.

[0269] In some cases, a variant PD-L1 polypeptide has a binding affinity to PD-1 that is from 1 nM to 1 mM. In some cases, a variant PD-L1 polypeptide of the present disclosure has a binding affinity to PD-1 that is from 100 nM to 100 μM. As another example, in some cases, a variant PD-L1 polypeptide has a binding affinity for PD1 (e.g., a PD1 polypeptide comprising the amino acid sequence set forth in SEQ ID NO: 105) that is from about 100 nM to 150 nM, from about 150 nM to about 200 nM, from about 200 nM to about 250 nM, from about 250 nM to about 300 nM, from about 300 nM to about 350 nM, from about 350 nM to about 400 nM, from about 400 nM to about 500 nM, from about 500 nM to about 600 nM, from about 600 nM to about 700 nM, from about 700 nM to about 800 nM, from about 800 nM to about 900 nM, from about 900 nM to about 1 μM, to about 1 μM to about 5 μM, from about 5 μM to about 10 μM, from about 10 M to about 15 μM, from about 15 μM to about 20 μM, from about 20 μM to about 25 μM, from about 25 μM to about 50 μM, from about 50 μM to about 75 μM, or from about 75 μM to about 100 μM.

[0270] In some cases, a variant PD-L1 polypeptide has a single amino acid substitution compared to the PD-L1 amino acid sequence set forth in SEQ ID NO: 103 or SEQ ID NO: 104. In some cases, a variant PD-L1 polypeptide has from 2 to 10 amino acid substitutions compared to the PD-L1 amino acid sequence set forth in SEQ ID NO: 103 or SEQ ID NO: 104. In some cases, a variant PD-L1 polypeptide has 2 amino acid substitutions compared to the PD-L1 amino acid sequence set forth in SEQ ID NO: 103 or SEQ ID NO: 104. In some cases, a variant PD-L1 polypeptide has 3 amino acid substitutions compared to the PD-L1 amino acid sequence set forth in SEQ ID NO: 103 or SEQ ID NO: 104. In some cases, a variant PD-L1 polypeptide has 4 amino acid substitutions compared to the PD-L1 amino acid sequence set forth in SEQ ID NO: 103 or SEQ ID NO: 104. In some cases, a variant PD-L1 polypeptide has 5 amino acid substitutions compared to the PD-L1 amino acid sequence set forth in SEQ ID NO: 103 or SEQ ID NO: 104. In some cases, a variant PD-L1 polypeptide has 6 amino acid substitutions compared to the PD-L1 amino acid sequence set forth in SEQ ID NO: 103 or SEQ ID NO: 104. In some cases, a variant PD-L1 polypeptide has 7 amino acid substitutions compared to the PD-L1 amino acid sequence set forth in SEQ ID NO: 103 or SEQ ID NO: 104. In some cases, a variant PD-L1 polypeptide has 8 amino acid substitutions compared to the PD-L1 amino acid sequence set forth in SEQ ID NO: 103 or SEQ ID NO: 104. In some cases, a variant PD-L1 polypeptide has 9 amino acid substitutions compared to the PD-L1 amino acid sequence set forth in SEQ ID NO: 103 or SEQ ID NO: 104. In some cases, a variant PD-L1 polypeptide has 10 amino acid substitutions compared to the PD-L1 amino acid sequence set forth in SEQ ID NO: 103 or SEQ ID NO: 104.

[0271] A suitable PD-L1 variant includes a polypeptide that comprises an amino acid sequence having at least 60%, at least 70%, at least 80%, at least 90%, at least 95%, at least 98%, at least 99%, or 100%, amino acid sequence identity to the following amino acid sequence:

[0272] FT VTVPKXLYVV EYGSNMTIEC KFPVEKQLDL AALIVYWEME DKNIIQFVHG EEDLKVQHSS YRQRARLLKD QLSLGNAALQ ITDVKLQDAG VYRCMISYGG ADYKRITVKV NAPYNKINQR ILVVDPVTSE HELTCQAEGY PKAEVIWTSS DHQVLSGKTT TTNSKREEKL FNVTSTLRIN TTTNEIFYCT FRRLDPEENH TAELVIPGNI LNVSIKI (SEQ ID NO: 106), where X is any amino acid other than Asp. In some cases, X is Ala. In some cases, X is Arg.

[0273] A suitable PD-L1 variant includes a polypeptide that comprises an amino acid sequence having at least 60%, at least 70%, at least 80%, at least 90%, at least 95%, at least 98%, at least 99%, or 100%, amino acid sequence identity to the following amino acid sequence:

[0274] FT VTVPKDLYVV EYGSNMTIEC KFPVEKQLDL AALXVYWEME DKNIIQFVHG EEDLKVQHSS YRQRARLLKD QLSLGNAALQ ITDVKLQDAG VYRCMISYGG ADYKRITVKV NAPYNKINQR ILVVDPVTSE HELTCQAEGY PKAEVIWTSS DHQVLSGKTT TTNSKREEKL FNVTSTLRIN TTTNEIFYCT FRRLDPEENH TAELVIPGNI LNVSIKI (SEQ ID NO: 107), where X is any amino acid other than Ile. In some cases, X is Asp.

[0275] A suitable PD-L1 variant includes a polypeptide that comprises an amino acid sequence having at least 60%, at least 70%, at least 80%, at least 90%, at least 95%, at least 98%, at least 99%, or 100%, amino acid sequence identity to the following amino acid sequence:

[0276] FT VTVPKDLYVV EYGSNMTIEC KFPVEKQLDL AALIVYWEME DKNIIQFVHG EXDLKVQHSS YRQRARLLKD QLSLGNAALQ ITDVKLQDAG VYRCMISYGG ADYKRITVKV NAPYNKINQR ILVVDPVTSE HELTCQAEGY PKAEVIWTSS DHQVLSGKTT TTNSKREEKL FNVTSTLRIN TTTNEIFYCT FRRLDPEENH TAELVIPGNI LNVSIKI (SEQ ID NO: 108), where X is any amino acid other than Glu. In some cases, X is Arg.

### CD80 Variants

[0277] In some cases, a variant immunomodulatory polypeptide present in a TMAPP of the present disclosure is a variant CD80 polypeptide. Wild-type CD80 binds to CD28.

[0278] A wild-type amino acid sequence of the ectodomain of human CD80 can be as follows:

[0279] VIHVTK EVKEVATLSC GHNVSVEELA QTRIYWQKEK KMVLTMMSGD MNIWPEYKNR TIFDITNNLS IVILALRPSD EGTYECVVLK YEKDAFKREH LAEVTLSVKA DFPTPSISDF EIPTSNIRRI ICSTSGGFPE PHLSWLENGE ELNAINTTVS QDPETELYAV SSKLDFNMTT NHSFMCLIKY GHLRVNQTFN WNTTKQEHFP DN (SEQ ID NO: 109).

[0280] A wild-type CD28 amino acid sequence can be as follows: MLRLLLALNL FPSIQVTGNK ILVKQSPMLV AYDNAVNLSC KYSYNLFSRE FRASLHKGLD SAVEVCVVYG NYSQQLQVYS KTGFNCDGKL GNESVTFYLQ NLYVNQTDIY FCKIEVMYPP PYLDNEKSNG TIIHVKGKHL CPSPLFPGPS KPFWVLVVVG GVLACYSLLV TVAFIIFWVR SKRSRLLHSD YMNMTPRRPG PTRKHYQPYA PPRDFAAYRS (SEQ ID NO: 110).

[0281] A wild-type CD28 amino acid sequence can be as follows: MLRLLLALNL FPSIQVTGNK ILVKQSPMLV AYDNAVNLSW KHLCPSPLFP GPSKPFWVLV VVGGVLACYS LLVTVAFIIF WVRSKRSRLL HSDYMNMTPR RPGPTRKHYQ PYAPPRDFAA YRS (SEQ ID NO: 111)

[0282] A wild-type CD28 amino acid sequence can be as follows: MLRLLLALNL FPSIQVTGKH LCPSPLFPGP SKPFWVLVVV GGVLACYSLL VTVAFIIFWV RSKRSRLLHS DYMNMTPRRP GPTRKHYQPY APPRDFAAYR S (SEQ ID NO: 112).

[0283] In some cases, a variant CD80 polypeptide exhibits reduced binding affinity to CD28, compared to the binding affinity of a CD80 polypeptide comprising the amino acid sequence set forth in SEQ ID NO: 109 for CD28. For example, in some cases, a variant CD80 polypeptide binds CD28 with a binding affinity that is at least 10% less, at least 15% less, at least 20% less, at least 25% less, at least 30% less, at least 35% less, at least 40% less, at least 45% less, at least 50% less, at least 55% less, at least 60% less, at least 65% less, at least 70% less, at least 75% less, at least 80% less, at least 85% less, at least 90% less, at least 95% less, or more than 95% less, than the binding affinity of a CD80 polypeptide comprising the amino acid sequence set forth in SEQ ID NO: 109 for CD28 (e.g., a CD28 polypeptide comprising the amino acid sequence set forth in one of SEQ ID NO: 110, 111, or 112).

[0284] In some cases, a variant CD80 polypeptide has a binding affinity to CD28 that is from 100 nM to 100 μM. As another example, in some cases, a variant CD80 polypeptide of the present disclosure has a binding affinity for CD28 (e.g., a CD28 polypeptide comprising the amino acid sequence set forth in SEQ ID NO: 110, SEQ ID NO: 111, or SEQ ID NO: 112) that is from about 100 nM to 150 nM, from about 150 nM to about 200 nM, from about 200 nM to about 250 nM, from about 250 nM to about 300 nM, from about 300 nM to about 350 nM, from about 350 nM to about 400 nM, from about 400 nM to about 500 nM, from about 500 nM to about 600 nM, from about 600 nM to about 700 nM, from about 700 nM to about 800 nM, from about 800 nM to about 900 nM, from about 900 nM to about 1 μM, to about 1 μM to about 5 M, from about 5 μM to about 10 μM, from about 10 μM to about 15 μM, from about 15 μM to about 20 μM, from about 20 μM to about 25 μM, from about 25 μM to about 50 μM, from about 50 μM to about 75 μM, or from about 75 μM to about 100 μM.

[0285] In some cases, a variant CD80 polypeptide has a single amino acid substitution compared to the CD80 amino acid sequence set forth in SEQ ID NO: 109. In some cases, a variant CD80 polypeptide has from 2 to 10 amino acid substitutions compared to the CD80 amino acid sequence set forth in SEQ ID NO: 109. In some cases, a variant CD80 polypeptide has 2 amino acid substitutions compared to the CD80 amino acid sequence set forth in SEQ ID NO: 109. In some cases, a variant CD80 polypeptide has 3 amino acid substitutions compared to the CD80 amino acid sequence set forth in SEQ ID NO: 109. In some cases, a variant CD80 polypeptide has 4 amino acid substitutions compared to the CD80 amino acid sequence set forth in SEQ ID NO: 109. In some cases, a variant CD80 polypeptide has 5 amino acid substitutions compared to the CD80 amino acid sequence set forth in SEQ ID NO: 109. In some cases, a variant CD80 polypeptide has 6 amino acid substitutions compared to the CD80 amino acid sequence set forth in SEQ ID NO: 109. In some cases, a variant CD80 polypeptide has 7 amino acid substitutions compared to the CD80 amino acid sequence set forth in SEQ ID NO: 109. In some cases, a variant CD80 polypeptide has 8 amino acid substitutions compared to the CD80 amino acid sequence set forth in SEQ ID NO: 109. In some cases, a variant CD80 polypeptide has 9 amino acid substitutions compared to the CD80 amino acid sequence set forth in SEQ ID NO: 109. In some cases, a variant CD80 polypeptide has 10 amino acid substitutions compared to the CD80 amino acid sequence set forth in SEQ ID NO: 109.

[0286] Suitable CD80 variants include a polypeptide that comprises an amino acid sequence having at least 60%, at least 70%, at least 80%, at least 90%, at least 95%, at least 98%, at least 99%, or 100%, amino acid sequence identity to any one of the following amino acid sequences:

[0287] VIHVTK EVKEVATLSC GHXVSVEELA QTRIYWQKEK KMVLTMMSGD MNIWPEYKNR TIFDITNNLS IVILALRPSD EGTYECVVLK YEKDAFKREH LAEVTLSVKA DFPTPSISDF EIPTSNIRRI ICSTSGGFPE PHLSWLENGE ELNAINTTVS QDPETELYAV SSKLDFNMTT NHSFMCLIKY GHLRVNQTFN WNTTKQEHFP DN (SEQ ID NO: 113), where X is any amino acid other than Asn. In some cases, X is Ala;

[0288] VIHVTK EVKEVATLSC GHNVSVEELA QTRIYWQKEK KMVLTMMSGD MNIWPEYKNR TIFDITXNLS IVILALRPSD EGTYECVVLK YEKDAFKREH LAEVTLSVKA DFPTPSISDF EIPTSNIRRI ICSTSGGFPE PHLSWLENGE ELNAINTTVS QDPETELYAV SSKLDFNMTT NHSFMCLIKY GHLRVNQTFN WNTTKQEHFP DN (SEQ ID NO: 114), where X is any amino acid other than Asn. In some cases, X is Ala;

[0289] VIHVTK EVKEVATLSC GHNVSVEELA QTRIYWQKEK KMVLTMMSGD MNIWPEYKNR TIFDITNNLS XVILALRPSD EGTYECVVLK YEKDAFKREH LAEVTLSVKA DFPTPSISDF EIPTSNIRRI ICSTSGGFPE PHLSWLENGE ELNAINTTVS QDPETELYAV SSKLDFNMTT NHSFMCLIKY GHLRVNQTFN WNTTKQEHFP DN (SEQ ID NO: 115), where X is any amino acid other than Ile. In some cases, X is Ala;

[0290] VIHVTK EVKEVATLSC GHNVSVEELA QTRIYWQKEK KMVLTMMSGD MNIWPEYKNR TIFDITNNLS IVILALRPSD EGTYECVVLX YEKDAFKREH LAEVTLSVKA DFPTPSISDF EIPTSNIRRI ICSTSGGFPE PHLSWLENGE ELNAINTTVS QDPETELYAV SSKLDFNMTT NHSFMCLIKY GHLRVNQTFN WNTTKQEHFP DN (SEQ ID NO: 116), where X is any amino acid other than Lys. In some cases, X is Ala;

[0291] VIHVTK EVKEVATLSC GHNVSVEELA QTRIYWQKEK KMVLTMMSGD MNIWPEYKNR TIFDITNNLS IVILALRPSD EGTYECVVLK YEKDAFKREH LAEVTLSVKA DFPTPSISDF EIPTSNIRRI ICSTSGGFPE PHLSWLENGE ELNAINTTVS XDPETELYAV SSKLDFNMTT NHSFMCLIKY GHLRVNQTFN WNTTKQEHFP DN (SEQ ID NO: 117), where X is any amino acid other than Gln. In some cases, X is Ala;

[0292] VIHVTK EVKEVATLSC GHNVSVEELA QTRIYWQKEK KMVLTMMSGD MNIWPEYKNR TIFDITNNLS IVILALRPSD EGTYECVVLK YEKDAFKREH LAEVTLSVKA DFPTPSISDF EIPTSNIRRI ICSTSGGFPE PHLSWLENGE ELNAINTTVS QXPETELYAV SSKLDFNMTT NHSFMCLIKY GHLRVNQTFN WNTTKQEHFP DN (SEQ ID NO: 118), where X is any amino acid other than Asp. In some cases, X is Ala;

[0293] VIHVTK EVKEVATLSC GHNVSVEEXA QTRIYWQKEK KMVLTMMSGD MNIWPEYKNR TIFDITNNLS IVILALRPSD EGTYECVVLK YEKDAFKREH LAEVTLSVKA DFPTPSISDF EIPTSNIRRI ICSTSGGFPE PHLSWLENGE ELNAINTTVS QDPETELYAV SSKLDFNMTT NHSFMCLIKY GHLRVNQTFN WNTTKQEHFP DN (SEQ ID NO: 119), where X is any amino acid other than Leu. In some cases, X is Ala;

[0294] VIHVTK EVKEVATLSC GHNVSVEELA QTRIXWQKEK KMVLTMMSGD MNIWPEYKNR TIFDITNNLS IVILALRPSD EGTYECVVLK YEKDAFKREH LAEVTLSVKA DFPTPSISDF EIPTSNIRRI ICSTSGGFPE PHLSWLENGE ELNAINTTVS QDPETELYAV SSKLDFNMTT NHSFMCLIKY GHLRVNQTFN WNTTKQEHFP DN (SEQ ID NO: 120), where X is any amino acid other than Tyr. In some cases, X is Ala;

[0295] VIHVTK EVKEVATLSC GHNVSVEELA QTRIYWXKEK KMVLTMMSGD MNIWPEYKNR TIFDITNNLS IVILALRPSD EGTYECVVLK YEKDAFKREH LAEVTLSVKA DFPTPSISDF EIPTSNIRRI ICSTSGGFPE PHLSWLENGE ELNAINTTVS QDPETELYAV SSKLDFNMTT NHSFMCLIKY GHLRVNQTFN WNTTKQEHFP DN (SEQ ID NO: 121), where X is any amino acid other than Gln. In some cases, X is Ala;

[0296] VIHVTK EVKEVATLSC GHNVSVEELA QTRIYWQKEK KXVLTMMSGD MNIWPEYKNR TIFDITNNLS IVILALRPSD EGTYECVVLK YEKDAFKREH LAEVTLSVKA DFPTPSISDF EIPTSNIRRI ICSTSGGFPE PHLSWLENGE ELNAINTTVS QDPETELYAV SSKLDFNMTT NHSFMCLIKY GHLRVNQTFN WNTTKQEHFP DN (SEQ ID NO: 122), where X is any amino acid other than Met. In some cases, X is Ala;

[0297] VIHVTK EVKEVATLSC GHNVSVEELA QTRIYWQKEK KMXLTMMSGD MNIWPEYKNR TIFDITNNLS IVILALRPSD EGTYECVVLK YEKDAFKREH LAEVTLSVKA DFPTPSISDF EIPTSNIRRI ICSTSGGFPE PHLSWLENGE ELNAINTTVS QDPETELYAV SSKLDFNMTT NHSFMCLIKY GHLRVNQTFN WNTTKQEHFP DN (SEQ ID NO: 123), where X is any amino acid other than Val. In some cases, X is Ala;

[0298] VIHVTK EVKEVATLSC GHNVSVEELA QTRIYWQKEK KMVLTMMSGD MNXWPEYKNR TIFDITNNLS IVILALRPSD EGTYECVVLK YEKDAFKREH LAEVTLSVKA DFPTPSISDF EIPTSNIRRI ICSTSGGFPE PHLSWLENGE ELNAINTTVS QDPETELYAV SSKLDFNMTT NHSFMCLIKY GHLRVNQTFN WNTTKQEHFP DN (SEQ ID NO: 124), where X is any amino acid other than Ile. In some cases, X is Ala;

[0299] VIHVTK EVKEVATLSC GHNVSVEELA QTRIYWQKEK KMVLTMMSGD MNIWPEXKNR TIFDITNNLS IVILALRPSD EGTYECVVLK YEKDAFKREH LAEVTLSVKA DFPTPSISDF EIPTSNIRRI ICSTSGGFPE PHLSWLENGE ELNAINTTVS QDPETELYAV SSKLDFNMTT NHSFMCLIKY GHLRVNQTFN WNTTKQEHFP DN (SEQ ID NO: 125), where X is any amino acid other than Tyr. In some cases, X is Ala;

[0300] VIHVTK EVKEVATLSC GHNVSVEELA QTRIYWQKEK KMVLTMMSGD MNIWPEYKNR TIFXITNNLS IVILALRPSD EGTYECVVLK YEKDAFKREH LAEVTLSVKA DFPTPSISDF EIPTSNIRRI ICSTSGGFPE PHLSWLENGE ELNAINTTVS QDPETELYAV SSKLDFNMTT NHSFMCLIKY GHLRVNQTFN WNTTKQEHFP DN (SEQ ID NO: 126), where X is any amino acid other than Asp. In some cases, X is Ala;

[0301] VIHVTK EVKEVATLSC GHNVSVEELA QTRIYWQKEK KMVLTMMSGD MNIWPEYKNR TIFDITNNLS IVILALRPSD EGTYECVVLK YEKDAFKREH LAEVTLSVKA DXPTPSISDF EIPTSNIRRI ICSTSGGFPE PHLSWLENGE ELNAINTTVS QDPETELYAV SSKLDFNMTT NHSFMCLIKY GHLRVNQTFN WNTTKQEHFP DN (SEQ ID NO: 127), where X is any amino acid other than Phe. In some cases, X is Ala;

[0302] VIHVTK EVKEVATLSC GHNVSVEELA QTRIYWQKEK KMVLTMMSGD MNIWPEYKNR TIFDITNNLS IVILALRPSD EGTYECVVLK YEKDAFKREH LAEVTLSVKA DFPTPSISDF EIPTSNIRRI ICSTSGGFPE PHLSWLENGE ELNAINTTVX QDPETELYAV SSKLDFNMTT NHSFMCLIKY GHLRVNQTFN WNTTKQEHFP DN (SEQ ID NO: 128), where X is any amino acid other than Ser. In some cases, X is Ala; and

[0303] VIHVTK EVKEVATLSC GHNVSVEELA QTRIYWQKEK KMVLTMMSGD MNIWPEYKNR TIFDITNNLS IVILALRPSD EGTYECVVLK YEKDAFKREH LAEVTLSVKA DFPTXSISDF EIPTSNIRRI ICSTSGGFPE PHLSWLENGE ELNAINTTVS QDPETELYAV SSKLDFNMTT NHSFMCLIKY GHLRVNQTFN WNTTKQEHFP DN (SEQ ID NO: 129), where X is any amino acid other than Pro. In some cases, X is Ala.

### CD86 Variants

[0304] In some cases, a variant immunomodulatory polypeptide present in a T TMAPP of the present disclosure is a variant CD86 polypeptide. Wild-type CD86 binds to CD28.

[0305] The amino acid sequence of the full ectodomain of a wild-type human CD86 can be as follows:

(SEQ ID NO: 130)
APLKIQAYFNETADLPCQFANSQNQSLSELVVFWQDQENLVLNEVYLGK
EKFDSVHSKYMNRTSFDSDSWTLRLHNLQIKDKGLYQCIIHHKKPTGMI
RIHQMNSELSVLANFSQPEIVPISNITENVYINLTCSSIHGYPEPKKMS
VLLRTKNSTIEYDGIMQKSQDNVTELYDVSISLSVSFPDVTSNMTIFCI
LETDKTRLLSSPFSIELEDPQPPPDHIP.

[0306] The amino acid sequence of the IgV domain of a wild-type human CD86 can be as follows:

(SEQ ID NO: 131)
APLKIQAYFNETADLPCQFANSQNQSLSELVVFWQDQENLVLNEVYLGK
EKFDSVHSKYMNRTSFDSDSWTLRLHNLQIKDKGLYQCIIHHKKPTGMI
RIHQMNSELSVL.

[0307] In some cases, a variant CD86 polypeptide exhibits reduced binding affinity to CD28, compared to the binding affinity of a CD86 polypeptide comprising the amino acid sequence set forth in SEQ ID NO: 130 or SEQ ID NO: 131 for CD28. For example, in some cases, a variant CD86 polypeptide binds CD28 with a binding affinity that is at least 10% less, at least 15% less, at least 20% less, at least 25% less, at least 30% less, at least 35% less, at least 40% less, at least 45% less, at least 50% less, at least 55% less, at least 60% less, at least 65% less, at least 70% less, at least 75% less, at least 80% less, at least 85% less, at least 90% less, at least 95% less, or more than 95% less, than the binding affinity of a CD86 polypeptide comprising the amino acid sequence set forth in SEQ ID NO: 130 or SEQ ID NO: 131 for CD28 (e.g., a CD28 polypeptide comprising the amino acid sequence set forth in one of SEQ ID NO: 110, 111, or 112).

[0308] In some cases, a variant CD86 polypeptide has a binding affinity to CD28 that is from 100 nM to 100 μM. As another example, in some cases, a variant CD86 polypeptide of the present disclosure has a binding affinity for CD28 (e.g., a CD28 polypeptide comprising the amino acid sequence set forth in one of SEQ ID NOs: 110, 111, or 112) that is from about 100 nM to 150 nM, from about 150 nM to about 200 nM, from about 200 nM to about 250 nM, from about 250 nM to about 300 nM, from about 300 nM to about 350 nM, from about 350 nM to about 400 nM, from about 400 nM to about 500 nM, from about 500 nM to about 600 nM, from about 600 nM to about 700 nM, from about 700 nM to about 800 nM, from about 800 nM to about 900 nM, from about 900 nM to about 1 μM, to about 1 μM to about 5 μM, from about 5 M to about 10 μM, from about 10 μM to about 15 μM, from about 15 μM to about 20 μM, from about 20 μM to about 25 μM, from about 25 μM to about 50 μM, from about 50 μM to about 75 M, or from about 75 μM to about 100 μM.

[0309] In some cases, a variant CD86 polypeptide has a single amino acid substitution compared to the CD86 amino acid sequence set forth in SEQ ID NO: 130. In some cases, a variant CD86 polypeptide has from 2 to 10 amino acid substitutions compared to the CD86 amino acid sequence set forth in SEQ ID NO: 130. In some cases, a variant CD86 polypeptide has 2 amino acid substitutions compared to the CD86 amino acid sequence set forth in SEQ ID NO: 130. In some cases, a variant CD86 polypeptide has 3 amino acid substitutions compared to the CD86 amino acid sequence set forth in SEQ ID NO: 130. In some cases, a variant CD86 polypeptide has 4 amino acid substitutions compared to the CD86 amino acid sequence set forth in SEQ ID NO: 130. In some cases, a variant CD86 polypeptide has 5 amino acid substitutions compared to the CD86 amino acid sequence set forth in SEQ ID NO: 130. In some cases, a variant CD86 polypeptide has 6 amino acid substitutions compared to the CD86 amino acid sequence set forth in SEQ ID NO: 130. In some cases, a variant CD86 polypeptide has 7 amino acid substitutions compared to the CD86 amino acid sequence set forth in SEQ ID NO: 130. In some cases, a variant CD86 polypeptide has 8 amino acid substitutions compared to the CD86 amino acid sequence set forth in SEQ ID NO: 130. In some cases, a variant CD86 polypeptide has 9 amino acid substitutions compared to the CD86 amino acid sequence set forth in SEQ ID NO: 130. In some cases, a variant CD86 polypeptide has 10 amino acid substitutions compared to the CD86 amino acid sequence set forth in SEQ ID NO: 130.

[0310] In some cases, a variant CD86 polypeptide has a single amino acid substitution compared to the CD86 amino acid sequence set forth in SEQ ID NO: 131. In some cases, a variant CD86 polypeptide has from 2 to 10 amino acid substitutions compared to the CD86 amino acid sequence set forth in SEQ ID NO: 131. In some cases, a variant CD86 polypeptide has 2 amino acid substitutions compared to the CD86 amino acid sequence set forth in SEQ ID NO: 131. In some cases, a variant CD86 polypeptide has 3 amino acid substitutions compared to the CD86 amino acid sequence set forth in SEQ ID NO: 131. In some cases, a variant CD86 polypeptide has 4 amino acid substitutions compared to the CD86 amino acid sequence set forth in SEQ ID NO: 131. In some cases, a variant CD86 polypeptide has 5 amino acid substitutions compared to the CD86 amino acid sequence set forth in SEQ ID NO: 131. In some cases, a variant CD86 polypeptide has 6 amino acid substitutions compared to the CD86 amino acid sequence set forth in SEQ ID NO: 131. In some cases, a variant CD86 polypeptide has 7 amino acid substitutions compared to the CD86 amino acid sequence set forth in SEQ ID NO: 131. In some cases, a variant CD86 polypeptide has 8 amino acid substitutions compared to the CD86 amino acid sequence set forth in SEQ ID NO: 131. In some cases, a variant CD86 polypeptide has 9 amino acid substitutions compared to the CD86 amino acid sequence set forth in SEQ ID NO: 131. In some cases, a variant CD86 polypeptide has 10 amino acid substitutions compared to the CD86 amino acid sequence set forth in SEQ ID NO: 131.

[0311] Suitable CD86 variants include a polypeptide that comprises an amino acid sequence having at least 60%, at least 70%, at least 80%, at least 90%, at least 95%, at least 98%, at least 99%, or 100%, amino acid sequence identity to any one of the following amino acid sequences:

[0312] APLKIQAYFNETADLPCQFANSQNQSLSELVVFWQDQENLVLNEVYLGKEKFDSVHSKY MXRTSFDSDSWTLRLHNLQIKDKGLYQCI IHHKKPTGMIRIHQMNSELSVLANFSQPEIVPI SN ITENVYINLTCSSIHGYPEPKKMSVLLRTKNSTIEYDGIMQKSQDNVTELYDVSISLSVSFPDV TSNMTIFCILETDKTRLLSSPFSIELEDPQPPPDHIP (SEQ ID NO: 132), where X is any amino acid other than Asn. In some cases, X is Ala;

[0313] APLKIQAYFNETADLPCQFANSQNQSLSELVVFWQDQENLVLNEVYLGKEKFDSVHSKY MNRTSFXSDSWTLRLHNLQIKDKGLYQCIIHHKKPTGMIRIHQMNSELSVLANFSQPEIVPISN ITENVYINLTCSSIHGYPEPKKMSVLLRTKNSTIEYDGIMQKSQDNVTELYDVSISLSVSFPDV TSNMTIFCILETDKTRLLSSPFSIELEDPQPPPDHIP (SEQ ID NO: 133), where X is any amino acid other than Asp. In some cases, X is Ala;

[0314] APLKIQAYFNETADLPCQFANSQNQSLSELVVFWQDQENLVLNEVYLGKEKFDSVHSKY MNRTSFDSDSXTLRLHNLQIKDKGLYQCIIHHKKPTGMIRIHQMNSELSVLANFSQPEIVPISN ITENVYINLTCSSIHGYPEPKKMSVLLRTKNSTIEYDGIMQKSQDNVTELYDVSISLSVSFPDV TSNMTIFCILETDKTRLLSSPFSIELEDPQPPPDHIP (SEQ ID NO:134), where X is any amino acid other than Trp. In some cases, X is Ala;

[0315] APLKIQAYFNETADLPCQFANSQNQSLSELVVFWQDQENLVLNEVYLGKEKFDSVHSKY MNRTSFDSDSWTLRLHNLQIKDKGLYQCIIHXKKPTGMIRIHQMNSELSVLANFSQPEIVPISN ITENVYINLTCSSIHGYPEPKKMSVLLRTKNSTIEYDGIMQKSQDNVTELYDVSISLSVSFPDV TSNMTIFCILETDKTRLLSSPFSIELEDPQPPPDHIP (SEQ ID NO: 135), where X is any amino acid other than His. In some cases, X is Ala;

[0316] APLKIQAYFNETADLPCQFANSQNQSLSELVVFWQDQENLVLNEVYLGKEKFDSVHSKY MXRTSFDSDSWTLRLHNLQIKDKGLYQCIIHHKKPTGMIRIHQMNSELSVL (SEQ ID NO: 136), where X is any amino acid other than Asn. In some cases, X is Ala;

[0317] APLKIQAYFNETADLPCQFANSQNQSLSELVVFWQDQENLVLNEVYLGKEKFDSVHSKY MNRTSFXSDSWTLRLHNLQIKDKGLYQCIIHHKKPTGMIRIHQMNSELSVL (SEQ ID NO: 137), where X is any amino acid other than Asp. In some cases, X is Ala;

[0318] APLKIQAYFNETADLPCQFANSQNQSLSELVVFWQDQENLVLNEVYLGKEKFDSVHSKY MNRTSFDSDSXTLRLHNLQIKDKGLYQCIIHHKKPTGMIRIHQMNSELSVL (SEQ ID NO: 138), where X is any amino acid other than Trp. In some cases, X is Ala;

[0319] APLKIQAYFNETADLPCQFANSQNQSLSELVVFWQDQENLVLNEVYLGKEKFDSVHSKY MNRTSFDSDSWTLRLHNLQIKDKGLYQCIIHXKKPTGMIRIHQMNSELSVL (SEQ ID NO: 139), where X is any amino acid other than His. In some cases, X is Ala;

[0320] APLKIQAYFNETADLPCQFANSQNQSLSELVVFWQDQENLXLNEVYLGKEKFDSVHSKY MNRTSFDSDSWTLRLHNLQIKDKGLYQCIIHHKKPTGMIRIHQMNSELSVLANFSQPEIVPISN ITENVYINLTCSSIHGYPEPKKMSVLLRTKNSTIEYDGIMQKSQDNVTELYDVSISLSVSFPDV TSNMTIFCILETDKTRLLSSPFSIELEDPQPPPDHIP (SEQ ID NO: 140), where X is any amino acid other than Val. In some cases, X is Ala;

[0321] APLKIQAYFNETADLPCQFANSQNQSLSELVVFWQDQENLXLNEVYLGKEKFDSVHSKY MNRTSFDSDSWTLRLHNLQIKDKGLYQCIIHHKKPTGMIRIHQMNSELSVL (SEQ ID NO: 141), where X is any amino acid other than Val. In some cases, X is Ala;

[0322] APLKIQAYFNETADLPCQFANSQNQSLSELVVFWXDQENLVLNEVYLGKEKFDSVHSKY MNRTSFDSDSWTLRLHNLQIKDKGLYQCIIHHKKPTGMIRIHQMNSELSVLANFSQPEIVPISN ITENVYINLTCSSIHGYPEPKKMSVLLRTKNSTIEYDGIMQKSQDNVTELYDVSISLSVSFPDV TSNMTIFCILETDKTRLLSSPFSIELEDPQPPPDHIP (SEQ ID NO: 142), where X is any amino acid other than Gln. In some cases, X is Ala;

[0323] APLKIQAYFNETADLPCQFANSQNQSLSELVVFWXDQENLVLNEVYLGKEKFDSVHSKY MNRTSFDSDSWTLRLHNLQIKDKGLYQCIIHHKKPTGMIRIHQMNSELSVL (SEQ ID NO: 143), where X is any amino acid other than Gln. In some cases, X is Ala;

[0324] APLKIQAYFNETADLPCQFANSQNQSLSELVVXWQDQENLVLNEVYLGKEKFDSVHSKY MNRTSFDSDSWTLRLHNLQIKDKGLYQCIIHHKKPTGMIRIHQMNSELSVLANFSQPEIVPISN ITENVYINLTCSSIHGYPEPKKMSVLLRTKNSTIEYDGIMQKSQDNVTELYDVSISLSVSFPDV TSNMTIFCILETDKTRLLSSPFSIELEDPQPPPDHIP (SEQ ID NO: 144), where X is any amino acid other than Phe. In some cases, X is Ala;

[0325] APLKIQAYFNETADLPCQFANSQNQSLSELVVXWQDQENLVLNEVYLGKEKFDSVHSKY MNRTSFDSDSWTLRLHNLQIKDKGLYQCIIHHKKPTGMIRIHQMNSELSVL (SEQ ID NO: 145), where X is any amino acid other than Phe. In some cases, X is Ala;

[0326] APLKIQAYFNETADLPCQFANSQNQSLSELVVFWQDQENLVLNEVYLGKEKFDSVHSKY MNRTSFDSDSWTXRLHNLQIKDKGLYQCIIHHKKPTGMIRIHQMNSELSVLANFSQPEIVPISN ITENVYINLTCSSIHGYPEPKKMSVLLRTKNSTIEYDGIMQKSQDNVTELYDVSISLSVSFPDV TSNMTIFCILETDKTRLLSSPFSIELEDPQPPPDHIP (SEQ ID NO: 146), where X is any amino acid other than Leu. In some cases, X is Ala;

[0327] APLKIQAYFNETADLPCQFANSQNQSLSELVVFWQDQENLVLNEVYLGKEKFDSVHSKY MNRTSFDSDSWTXRLHNLQIKDKGLYQCIIHHKKPTGMIRIHQMNSELSVL (SEQ ID NO: 147), where X is any amino acid other than Leu. In some cases, X is Ala;

[0328] APLKIQAYFNETADLPCQFANSQNQSLSELVVFWQDQENLVLNEVYLGKEKFDSVHSKX MNRTSFDSDSWTLRLHNLQIKDKGLYQCIIHHKKPTGMIRIHQMNSELSVLANFSQPEIVPISN ITENVYINLTCSSIHGYPEPKKMSVLLRTKNSTIEYDGIMQKSQDNVTELYDVSISLSVSFPDV TSNMTIFCILETDKTRLLSSPFSIELEDPQPPPDHIP (SEQ ID NO: 148), where X is any amino acid other than Tyr. In some cases, X is Ala;

[0329] APLKIQAYFNETADLPCQFANSQNQSLSELVVFWQDQENLVLNEVYLGKEKFDSVHSKX MNRTSFDSDSWTLRLHNLQIKDKGLYQCIIHHKKPTGMIRIHQMNSELSVL (SEQ ID NO: 149), where X is any amino acid other than Tyr. In some cases, X is Ala;

[0330] APLKIQAYFNETADLPCQFANSQNQSLSELVVFWQDQENLVLNEVYLGKEKFDSVHSKY MXRTSFDSDSWTLRLHNLQIKDKGLYQCIIHXKKPTGMIRIHQMNSELSVLANFSQPEIVPI SN ITENVYINLTCSSIHGYPEPKKMSVLLRTKNSTIEYDGIMQKSQDNVTELYDVSISLSVSFPDV TSNMTIFCILETDKTRLLSSPFSIELEDPQPPPDHIP (SEQ ID NO: 150), where the first X is any amino acid other than Asn and the second X is any amino acid other than His. In some cases, the first and the second X are both Ala;

[0331] APLKIQAYFNETADLPCQFANSQNQSLSELVVFWQDQENLVLNEVYLGKEKFDSVHSKY MXRTSFDSDSWTLRLHNLQIKDKGLYQCIIHXKKPTGMIRIHQMNSELSVL (SEQ ID NO: 151), where the first X is any amino acid other than Asn and the second X is any amino acid other than His. In some cases, the first and the second X are both Ala;

[0332] APLKIQAYFNETADLPCQFANSQNQSLSELVVFWQDQENLVLNEVYLGKEKFDSVHSKY MNRTSFX₁SDSWTLRLHNLQIKDKGLYQCIIHX₂KKPTGMIRIHQMNSELSVLANFSQPEIVPIS NITENVYINLTCSSIHGYPEPKKMSVLLRTKNSTIEYDGIMQKSQDNVTELYDVSISLSVSFPD VTSNMTIFCILETDKTRLLSSPFSIELEDPQPPPDHIP (SEQ ID NO: 152), where X₁ is any amino acid other than Asp, and X₂ is any amino acid other than His. In some cases, X₁ is Ala and X₂ is Ala;

[0333] APLKIQAYFNETADLPCQFANSQNQSLSELVVFWQDQENLVLNEVYLGKEKFDSVHSKY MNRTSFX₁SDSWTLRLHNLQIKDKGLYQCIIHX₂KKPTGMIRIHQMNSELSVL (SEQ ID NO: 153), where the first X is any amino acid other than Asn and the second X is any amino acid other than His. In some cases, the first and the second X are both Ala;

[0334] APLKIQAYFNETADLPCQFANSQNQSLSELVVFWQDQENLVLNEVYLGKEKFDSVHSKY MX₁RTSF\vec{X₂}SDSWTLRLHNLQIKDKGLYQCIIHX₃KKPTGMIRIHQMNSELSVLANFSQPEIVPI SNITENVYINLTCSSIHGYPEPKKMSVLLRTKNSTIEYDGIMQKSQDNVTELYDVSISLSVSFP DVTSNMTIFCILETDKTRLLSSPFSIELEDPQPPPDHIP (SEQ ID NO: 154), where X₁ is any amino acid other than Asn, X₂ is any amino acid other than Asp, and X₃ is any amino acid other than His. In some cases, X₁ is Ala, X₂ is Ala, and X₃ is Ala; and

[0335] APLKIQAYFNETADLPCQFANSQNQSLSELVVFWQDQENLVLNEVYLGKEKFDSVHSKY M\vec{X₁}RTSF\vec{X₂}SDSWTLRLHNLQIKDKGLYQCIIH\vec{X₃}KKPTGMIRIHQMNSELSVL (SEQ ID NO: 155), where X₁ is any amino acid other than Asn, X₂ is any amino acid other than Asp, and X₃ is any amino acid other than His In some cases, X₁ is Ala, X₂ is Ala, and X₃ is Ala.

### 4-1BBL Variants

[0336] In some cases, a variant immunomodulatory polypeptide present in a TMAPP of the present disclosure is a variant 4-1BBL polypeptide. Wild-type 4-1BBL binds to 4-1BB (CD137).

[0337] A wild-type 4-1BBL amino acid sequence can be as follows: MEYASDASLD PEAPWPPAPR ARACRVLPWA LVAGLLLLLL LAAACAVFLA CPWAVSGARA SPGSAASPRL REGPELSPDD PAGLLDLRQG MFAQLVAQNV LLIDGPLSWY SDPGLAGVSL TGGLSYKEDT KELVVAKAGV YYVFFQLELR RVVAGEGSGS VSLALHLQPL RSAAGAAALA LTVDLPPASS EARNSAFGFQ GRLLHLSAGQ RLGVHLHTEA RARHAWQLTQ GATVLGLFRV TPEIPAGLPS PRSE (SEQ ID NO: 156).

[0338] In some cases, a variant 4-1BBL polypeptide is a variant of the tumor necrosis factor (TNF) homology domain (THD) of human 4-1BBL.

[0339] A wild-type amino acid sequence of the THD of human 4-1BBL can be, e.g., one of SEQ ID NOs: 157-159, as follows:

(SEQ ID NO: 157)
PAGLLDLRQG MFAQLVAQNV LLIDGPLSWY SDPGLAGVSL
TGGLSYKEDT KELVVAKAGV YYVFFQLELR RVVAGEGSGS
VSLALHLQPL RSAAGAAALA LTVDLPPASS EARNSAFGFQ
GRLLHLSAGQ RLGVHLHTEA RARHAWQLTQ GATVLGLFRV
TPEIPAGLPS PRSE.
(SEQ ID NO: 158)
D PAGLLDLRQG MFAQLVAQNV LLIDGPLSWY SDPGLAGVSL
TGGLSYKEDT KELVVAKAGV YYVFFQLELR RVVAGEGSGS
VSLALHLQPL RSAAGAAALA LTVDLPPASS EARNSAFGFQ
GRLLHLSAGQ RLGVHLHTEA RARHAWQLTQ GATVLGLFRV
TPEIPAGLPS PRSE.
(SEQ ID NO: 159)
D PAGLLDLRQG MFAQLVAQNV LLIDGPLSWY SDPGLAGVSL
TGGLSYKEDT KELVVAKAGV YYVFFQLELR RVVAGEGSGS
VSLALHLQPL RSAAGAAALA LTVDLPPASS EARNSAFGFQ
GRLLHLSAGQ RLGVHLHTEA RARHAWQLTQ GATVLGLFRV
TPEIPA.

[0340] A wild-type 4-1BB amino acid sequence can be as follows: MGNSCYNIVA TLLLVLNFER TRSLQDPCSN CPAGTFCDNN RNQICSPCPP NSFSSAGGQR TCDICRQCKG VFRTRKECSS TSNAECDCTP GFHCLGAGCS MCEQDCKQGQ ELTKKGCKDC CFGTFNDQKR GICRPWTNCS LDGKSVLVNG TKERDVVCGP SPADLSPGAS SVTPPAPARE PGHSPQIISF FLALTSTALL FLLFFLTLRF SVVKRGRKKL LYIFKQPFMR PVQTTQEEDG CSCRFPEEEE GGCEL (SEQ ID NO: 160).

[0341] In some cases, a variant 4-1BBL polypeptide exhibits reduced binding affinity to 4-1BB, compared to the binding affinity of a 4-1BBL polypeptide comprising the amino acid sequence set forth in one of SEQ ID NOs: 156-159. For example, in some cases, a variant 4-1BBL polypeptide of the present disclosure binds 4-1BB with a binding affinity that is at least 10% less, at least 15% less, at least 20% less, at least 25%, at least 30% less, at least 35% less, at least 40% less, at least 45% less, at least 50% less, at least 55% less, at least 60% less, at least 65% less, at least 70% less, at least 75% less, at least 80% less, at least 85% less, at least 90% less, at least 95% less, or more than 95% less, than the binding affinity of a 4-1BBL polypeptide comprising the amino acid sequence set forth in one of SEQ ID NOs: 156-159 for a 4-1BB polypeptide (e.g., a 4-1BB polypeptide comprising the amino acid sequence set forth in SEQ ID NO: 160), when assayed under the same conditions.

[0342] In some cases, a variant 4-1BBL polypeptide has a binding affinity to 4-1BB that is from 100 nM to 100 μM. As another example, in some cases, a variant 4-1BBL polypeptide has a binding affinity for 4-1BB (e.g., a 4-1BB polypeptide comprising the amino acid sequence set forth in SEQ ID NO: 160) that is from about 100 nM to 150 nM, from about 150 nM to about 200 nM, from about 200 nM to about 250 nM, from about 250 nM to about 300 nM, from about 300 nM to about 350 nM, from about 350 nM to about 400 nM, from about 400 nM to about 500 nM, from about 500 nM to about 600 nM, from about 600 nM to about 700 nM, from about 700 nM to about 800 nM, from about 800 nM to about 900 nM, from about 900 nM to about 1 μM, to about 1 μM to about 5 μM, from about 5 μM to about 10 μM, from about 10 μM to about 15 M, from about 15 μM to about 20 μM, from about 20 μM to about 25 μM, from about 25 μM to about 50 μM, from about 50 μM to about 75 μM, or from about 75 μM to about 100 μM.

[0343] In some cases, a variant 4-1BBL polypeptide has a single amino acid substitution compared to the 4-1BBL amino acid sequence set forth in one of SEQ ID NOs: 156-159. In some cases, a variant 4-1BBL polypeptide has from 2 to 10 amino acid substitutions compared to the 4-1BBL amino acid sequence set forth in one of SEQ ID NOs: 156-159. In some cases, a variant 4-1BBL polypeptide has 2 amino acid substitutions compared to the 4-1BBL amino acid sequence set forth in one of SEQ ID NOs: 156-159. In some cases, a variant 4-1BBL polypeptide has 3 amino acid substitutions compared to the 4-1BBL amino acid sequence set forth in one of SEQ ID NOs: 156-159. In some cases, a variant 4-1BBL polypeptide has 4 amino acid substitutions compared to the 4-1BBL amino acid sequence set forth in one of SEQ ID NOs: 156-159. In some cases, a variant 4-1BBL polypeptide has 5 amino acid substitutions compared to the 4-1BBL amino acid sequence set forth in one of SEQ ID NOs: 156-159. In some cases, a variant 4-1BBL polypeptide has 6 amino acid substitutions compared to the 4-1BBL amino acid sequence set forth in one of SEQ ID NOs: 156-159. In some cases, a variant 4-1BBL polypeptide has 7 amino acid substitutions compared to the 4-1BBL amino acid sequence set forth in one of SEQ ID NOs: 156-159. In some cases, a variant 4-1BBL polypeptide has 8 amino acid substitutions compared to the 4-1BBL amino acid sequence set forth in one of SEQ ID NOs: 156-159. In some cases, a variant 4-1BBL polypeptide has 9 amino acid substitutions compared to the 4-1BBL amino acid sequence set forth in one of SEQ ID NOs: 156-159. In some cases, a variant 4-1BBL polypeptide has 10 amino acid substitutions compared to the 4-1BBL amino acid sequence set forth in one of SEQ ID NOs: 156-159.

[0344] Suitable 4-1BBL variants include a polypeptide that comprises an amino acid sequence having at least 60%, at least 70%, at least 80%, at least 90%, at least 95%, at least 98%, at least 99%, or 100%, amino acid sequence identity to any one of the following amino acid sequences:

[0345] PAGLLDLRQG MFAQLVAQNV LLIDGPLSWY SDPGLAGVSL TGGLSYXEDT KELVVAKAGV YYVFFQLELR RVVAGEGSGS VSLALHLQPL RSAAGAAALA LTVDLPPASS EARNSAFGFQ GRLLHLSAGQ RLGVHLHTEA RARHAWQLTQ GATVLGLFRV TPEIPAGLPS PRSE (SEQ ID NO: 161), where X is any amino acid other than Lys. In some cases, X is Ala;

[0346] PAGLLDLRQG MFAQLVAQNV LLIDGPLSWY SDPGLAGVSL TGGLSYKEDT KELVVAKAGV YYVFFQLELR RVVAGEGSGS VSLALHLQPL RSAAGAAALA LTVDLPPASS EARNSAFGFQ GRLLHLSAGQ RLGVHLHTEA RARHAWXLTQ GATVLGLFRV TPEIPAGLPS PRSE (SEQ ID NO: 162), where X is any amino acid other than Gln. In some cases, X is Ala;

[0347] PAGLLDLRQG XFAQLVAQNV LLIDGPLSWY SDPGLAGVSL TGGLSYKEDT KELVVAKAGV YYVFFQLELR RVVAGEGSGS VSLALHLQPL RSAAGAAALA LTVDLPPASS EARNSAFGFQ GRLLHLSAGQ RLGVHLHTEA RARHAWQLTQ GATVLGLFRV TPEIPAGLPS PRSE (SEQ ID NO: 163), where X is any amino acid other than Met. In some cases, X is Ala;

[0348] PAGLLDLRQG MXAQLVAQNV LLIDGPLSWY SDPGLAGVSL TGGLSYKEDT KELVVAKAGV YYVFFQLELR RVVAGEGSGS VSLALHLQPL RSAAGAAALA LTVDLPPASS EARNSAFGFQ GRLLHLSAGQ RLGVHLHTEA RARHAWQLTQ GATVLGLFRV TPEIPAGLPS PRSE (SEQ ID NO: 164), where X is any amino acid other than Phe. In some cases, X is Ala;

[0349] PAGLLDLRQG MFAXLVAQNV LLIDGPLSWY SDPGLAGVSL TGGLSYKEDT KELVVAKAGV YYVFFQLELR RVVAGEGSGS VSLALHLQPL RSAAGAAALA LTVDLPPASS EARNSAFGFQ GRLLHLSAGQ RLGVHLHTEA RARHAWQLTQ GATVLGLFRV TPEIPAGLPS PRSE (SEQ ID NO: 165), where X is any amino acid other than Gln. In some cases, X is Ala;

[0350] PAGLLDLRQG MFAQXVAQNV LLIDGPLSWY SDPGLAGVSL TGGLSYKEDT KELVVAKAGV YYVFFQLELR RVVAGEGSGS VSLALHLQPL RSAAGAAALA LTVDLPPASS EARNSAFGFQ GRLLHLSAGQ RLGVHLHTEA RARHAWQLTQ GATVLGLFRV TPEIPAGLPS PRSE (SEQ ID NO:166), where X is any amino acid other than Leu. In some cases, X is Ala;

[0351] PAGLLDLRQG MFAQLXAQNV LLIDGPLSWY SDPGLAGVSL TGGLSYKEDT KELVVAKAGV YYVFFQLELR RVVAGEGSGS VSLALHLQPL RSAAGAAALA LTVDLPPASS EARNSAFGFQ GRLLHLSAGQ RLGVHLHTEA RARHAWQLTQ GATVLGLFRV TPEIPAGLPS PRSE (SEQ ID NO: 167), where X is any amino acid other than Val. In some cases, X is Ala;

[0352] PAGLLDLRQG MFAQLVAXNV LLIDGPLSWY SDPGLAGVSL TGGLSYKEDT KELVVAKAGV YYVFFQLELR RVVAGEGSGS VSLALHLQPL RSAAGAAALA LTVDLPPASS EARNSAFGFQ GRLLHLSAGQ RLGVHLHTEA RARHAWQLTQ GATVLGLFRV TPEIPAGLPS PRSE (SEQ ID NO: 168), where X is any amino acid other than Gln. In some cases, X is Ala;

[0353] PAGLLDLRQG MFAQLVAQXV LLIDGPLSWY SDPGLAGVSL TGGLSYKEDT KELVVAKAGV YYVFFQLELR RVVAGEGSGS VSLALHLQPL RSAAGAAALA LTVDLPPASS EARNSAFGFQ GRLLHLSAGQ RLGVHLHTEA RARHAWQLTQ GATVLGLFRV TPEIPAGLPS PRSE (SEQ ID NO: 169), where X is any amino acid other than Asn. In some cases, X is Ala;

[0354] PAGLLDLRQG MFAQLVAQNX LLIDGPLSWY SDPGLAGVSL TGGLSYKEDT KELVVAKAGV YYVFFQLELR RVVAGEGSGS VSLALHLQPL RSAAGAAALA LTVDLPPASS EARNSAFGFQ GRLLHLSAGQ RLGVHLHTEA RARHAWQLTQ GATVLGLFRV TPEIPAGLPS PRSE (SEQ ID NO: 170), where X is any amino acid other than Val. In some cases, X is Ala;

[0355] PAGLLDLRQG MFAQLVAQNV XLIDGPLSWY SDPGLAGVSL TGGLSYKEDT KELVVAKAGV YYVFFQLELR RVVAGEGSGS VSLALHLQPL RSAAGAAALA LTVDLPPASS EARNSAFGFQ GRLLHLSAGQ RLGVHLHTEA RARHAWQLTQ GATVLGLFRV TPEIPAGLPS PRSE (SEQ ID NO: 171), where X is any amino acid other than Leu. In some cases, X is Ala;

[0356] PAGLLDLRQG MFAQLVAQNV LXIDGPLSWY SDPGLAGVSL TGGLSYKEDT KELVVAKAGV YYVFFQLELR RVVAGEGSGS VSLALHLQPL RSAAGAAALA LTVDLPPASS EARNSAFGFQ GRLLHLSAGQ RLGVHLHTEA RARHAWQLTQ GATVLGLFRV TPEIPAGLPS PRSE (SEQ ID NO: 172), where X is any amino acid other than Leu. In some cases, X is Ala;

[0357] PAGLLDLRQG MFAQLVAQNV LLXDGPLSWY SDPGLAGVSL TGGLSYKEDT KELVVAKAGV YYVFFQLELR RVVAGEGSGS VSLALHLQPL RSAAGAAALA LTVDLPPASS EARNSAFGFQ GRLLHLSAGQ RLGVHLHTEA RARHAWQLTQ GATVLGLFRV TPEIPAGLPS PRSE (SEQ ID NO: 173), where X is any amino acid other than Ile. In some cases, X is Ala;

[0358] PAGLLDLRQG MFAQLVAQNV LLIXGPLSWY SDPGLAGVSL TGGLSYKEDT KELVVAKAGV YYVFFQLELR RVVAGEGSGS VSLALHLQPL RSAAGAAALA LTVDLPPASS EARNSAFGFQ GRLLHLSAGQ RLGVHLHTEA RARHAWQLTQ GATVLGLFRV TPEIPAGLPS PRSE (SEQ ID NO: 174), where X is any amino acid other than Asp. In some cases, X is Ala;

[0359] PAGLLDLRQG MFAQLVAQNV LLIDXPLSWY SDPGLAGVSL TGGLSYKEDT KELVVAKAGV YYVFFQLELR RVVAGEGSGS VSLALHLQPL RSAAGAAALA LTVDLPPASS EARNSAFGFQ GRLLHLSAGQ RLGVHLHTEA RARHAWQLTQ GATVLGLFRV TPEIPAGLPS PRSE (SEQ ID NO: 175), where X is any amino acid other than Gly. In some cases, X is Ala;

[0360] PAGLLDLRQG MFAQLVAQNV LLIGGXLSWY SDPGLAGVSL TGGLSYKEDT KELVVAKAGV YYVFFQLELR RVVAGEGSGS VSLALHLQPL RSAAGAAALA LTVDLPPASS EARNSAFGFQ GRLLHLSAGQ RLGVHLHTEA RARHAWQLTQ GATVLGLFRV TPEIPAGLPS PRSE (SEQ ID NO: 176), where X is any amino acid other than Pro. In some cases, X is Ala;

[0361] PAGLLDLRQG MFAQLVAQNV LLIGGPXSWY SDPGLAGVSL TGGLSYKEDT KELVVAKAGV YYVFFQLELR RVVAGEGSGS VSLALHLQPL RSAAGAAALA LTVDLPPASS EARNSAFGFQ GRLLHLSAGQ RLGVHLHTEA RARHAWQLTQ GATVLGLFRV TPEIPAGLPS PRSE (SEQ ID NO: 177), where X is any amino acid other than Leu. In some cases, X is Ala;

[0362] PAGLLDLRQG MFAQLVAQNV LLIGGPLXWY SDPGLAGVSL TGGLSYKEDT KELVVAKAGV YYVFFQLELR RVVAGEGSGS VSLALHLQPL RSAAGAAALA LTVDLPPASS EARNSAFGFQ GRLLHLSAGQ RLGVHLHTEA RARHAWQLTQ GATVLGLFRV TPEIPAGLPS PRSE (SEQ ID NO: 178), where X is any amino acid other than Ser. In some cases, X is Ala;

[0363] PAGLLDLRQG MFAQLVAQNV LLIGGPLSXY SDPGLAGVSL TGGLSYKEDT KELVVAKAGV YYVFFQLELR RVVAGEGSGS VSLALHLQPL RSAAGAAALA LTVDLPPASS EARNSAFGFQ GRLLHLSAGQ RLGVHLHTEA RARHAWQLTQ GATVLGLFRV TPEIPAGLPS PRSE (SEQ ID NO: 179), where X is any amino acid other than Trp. In some cases, X is Ala;

[0364] PAGLLDLRQG MFAQLVAQNV LLIGGPLSWX SDPGLAGVSL TGGLSYKEDT KELVVAKAGV YYVFFQLELR RVVAGEGSGS VSLALHLQPL RSAAGAAALA LTVDLPPASS EARNSAFGFQ GRLLHLSAGQ RLGVHLHTEA RARHAWQLTQ GATVLGLFRV TPEIPAGLPS PRSE (SEQ ID NO: 180), where X is any amino acid other than Tyr. In some cases, X is Ala;

[0365] PAGLLDLRQG MFAQLVAQNV LLIGGPLSWY XDPGLAGVSL TGGLSYKEDT KELVVAKAGV YYVFFQLELR RVVAGEGSGS VSLALHLQPL RSAAGAAALA LTVDLPPASS EARNSAFGFQ GRLLHLSAGQ RLGVHLHTEA RARHAWQLTQ GATVLGLFRV TPEIPAGLPS PRSE (SEQ ID NO: 181), where X is any amino acid other than Ser. In some cases, X is Ala;

[0366] PAGLLDLRQG MFAQLVAQNV LLIGGPLSWY SXPGLAGVSL TGGLSYKEDT KELVVAKAGV YYVFFQLELR RVVAGEGSGS VSLALHLQPL RSAAGAAALA LTVDLPPASS EARNSAFGFQ GRLLHLSAGQ RLGVHLHTEA RARHAWQLTQ GATVLGLFRV TPEIPAGLPS PRSE (SEQ ID NO: 182), where X is any amino acid other than Asp. In some cases, X is Ala;

[0367] PAGLLDLRQG MFAQLVAQNV LLIGGPLSWY SDXGLAGVSL TGGLSYKEDT KELVVAKAGV YYVFFQLELR RVVAGEGSGS VSLALHLQPL RSAAGAAALA LTVDLPPASS EARNSAFGFQ GRLLHLSAGQ RLGVHLHTEA RARHAWQLTQ GATVLGLFRV TPEIPAGLPS PRSE (SEQ ID NO: 183), where X is any amino acid other than Pro. In some cases, X is Ala;

[0368] PAGLLDLRQG MFAQLVAQNV LLIGGPLSWY SDPXLAGVSL TGGLSYKEDT KELVVAKAGV YYVFFQLELR RVVAGEGSGS VSLALHLQPL RSAAGAAALA LTVDLPPASS EARNSAFGFQ GRLLHLSAGQ RLGVHLHTEA RARHAWQLTQ GATVLGLFRV TPEIPAGLPS PRSE (SEQ ID NO: 184), where X is any amino acid other than Gly. In some cases, X is Ala;

[0369] PAGLLDLRQG MFAQLVAQNV LLIGGPLSWY SDPGXAGVSL TGGLSYKEDT KELVVAKAGV YYVFFQLELR RVVAGEGSGS VSLALHLQPL RSAAGAAALA LTVDLPPASS EARNSAFGFQ GRLLHLSAGQ RLGVHLHTEA RARHAWQLTQ GATVLGLFRV TPEIPAGLPS PRSE (SEQ ID NO: 185), where X is any amino acid other than Leu. In some cases, X is Ala;

[0370] PAGLLDLRQG MFAQLVAQNV LLIGGPLSWY SDPGLAXVSL TGGLSYKEDT KELVVAKAGV YYVFFQLELR RVVAGEGSGS VSLALHLQPL RSAAGAAALA LTVDLPPASS EARNSAFGFQ GRLLHLSAGQ RLGVHLHTEA RARHAWQLTQ GATVLGLFRV TPEIPAGLPS PRSE (SEQ ID NO: 186), where X is any amino acid other than Gly. In some cases, X is Ala;

[0371] PAGLLDLRQG MFAQLVAQNV LLIGGPLSWY SDPGLAGXSL TGGLSYKEDT KELVVAKAGV YYVFFQLELR RVVAGEGSGS VSLALHLQPL RSAAGAAALA LTVDLPPASS EARNSAFGFQ GRLLHLSAGQ RLGVHLHTEA RARHAWQLTQ GATVLGLFRV TPEIPAGLPS PRSE (SEQ ID NO: 187), where X is any amino acid other than Val. In some cases, X is Ala;

[0372] PAGLLDLRQG MFAQLVAQNV LLIGGPLSWY SDPGLAGVXL TGGLSYKEDT KELVVAKAGV YYVFFQLELR RVVAGEGSGS VSLALHLQPL RSAAGAAALA LTVDLPPASS EARNSAFGFQ GRLLHLSAGQ RLGVHLHTEA RARHAWQLTQ GATVLGLFRV TPEIPAGLPS PRSE (SEQ ID NO: 188), where X is any amino acid other than Ser. In some cases, X is Ala;

[0373] PAGLLDLRQG MFAQLVAQNV LLIGGPLSWY SDPGLAGVSX TGGLSYKEDT KELVVAKAGV YYVFFQLELR RVVAGEGSGS VSLALHLQPL RSAAGAAALA LTVDLPPASS EARNSAFGFQ GRLLHLSAGQ RLGVHLHTEA RARHAWQLTQ GATVLGLFRV TPEIPAGLPS PRSE (SEQ ID NO: 189), where X is any amino acid other than Leu. In some cases, X is Ala;

[0374] PAGLLDLRQG MFAQLVAQNV LLIGGPLSWY SDPGLAGVSL XGGLSYKEDT KELVVAKAGV YYVFFQLELR RVVAGEGSGS VSLALHLQPL RSAAGAAALA LTVDLPPASS EARNSAFGFQ GRLLHLSAGQ RLGVHLHTEA RARHAWQLTQ GATVLGLFRV TPEIPAGLPS PRSE (SEQ ID NO: 190), where X is any amino acid other than Thr. In some cases, X is Ala;

[0375] PAGLLDLRQG MFAQLVAQNV LLIGGPLSWY SDPGLAGVSL TXGLSYKEDT KELVVAKAGV YYVFFQLELR RVVAGEGSGS VSLALHLQPL RSAAGAAALA LTVDLPPASS EARNSAFGFQ GRLLHLSAGQ RLGVHLHTEA RARHAWQLTQ GATVLGLFRV TPEIPAGLPS PRSE (SEQ ID NO:191), where X is any amino acid other than Gly. In some cases, X is Ala;

[0376] PAGLLDLRQG MFAQLVAQNV LLIGGPLSWY SDPGLAGVSL TGXLSYKEDT KELVVAKAGV YYVFFQLELR RVVAGEGSGS VSLALHLQPL RSAAGAAALA LTVDLPPASS EARNSAFGFQ GRLLHLSAGQ RLGVHLHTEA RARHAWQLTQ GATVLGLFRV TPEIPAGLPS PRSE (SEQ ID NO: 192), where X is any amino acid other than Gly. In some cases, X is Ala;

[0377] PAGLLDLRQG MFAQLVAQNV LLIGGPLSWY SDPGLAGVSL TGGXSYKEDT KELVVAKAGV YYVFFQLELR RVVAGEGSGS VSLALHLQPL RSAAGAAALA LTVDLPPASS EARNSAFGFQ GRLLHLSAGQ RLGVHLHTEA RARHAWQLTQ GATVLGLFRV TPEIPAGLPS PRSE (SEQ ID NO: 193), where X is any amino acid other than Leu. In some cases, X is Ala;

[0378] PAGLLDLRQG MFAQLVAQNV LLIGGPLSWY SDPGLAGVSL TGGLXYKEDT KELVVAKAGV YYVFFQLELR RVVAGEGSGS VSLALHLQPL RSAAGAAALA LTVDLPPASS EARNSAFGFQ GRLLHLSAGQ RLGVHLHTEA RARHAWQLTQ GATVLGLFRV TPEIPAGLPS PRSE (SEQ ID NO: 194), where X is any amino acid other than Ser. In some cases, X is Ala;

[0379] PAGLLDLRQG MFAQLVAQNV LLIGGPLSWY SDPGLAGVSL TGGLSXKEDT KELVVAKAGV YYVFFQLELR RVVAGEGSGS VSLALHLQPL RSAAGAAALA LTVDLPPASS EARNSAFGFQ GRLLHLSAGQ RLGVHLHTEA RARHAWQLTQ GATVLGLFRV TPEIPAGLPS PRSE (SEQ ID NO: 195), where X is any amino acid other than Tyr. In some cases, X is Ala;

[0380] PAGLLDLRQG MFAQLVAQNV LLIGGPLSWY SDPGLAGVSL TGGLSYKXDT KELVVAKAGV YYVFFQLELR RVVAGEGSGS VSLALHLQPL RSAAGAAALA LTVDLPPASS EARNSAFGFQ GRLLHLSAGQ RLGVHLHTEA RARHAWQLTQ GATVLGLFRV TPEIPAGLPS PRSE (SEQ ID NO: 196), where X is any amino acid other than Glu. In some cases, X is Ala;

[0381] PAGLLDLRQG MFAQLVAQNV LLIGGPLSWY SDPGLAGVSL TGGLSYKEXT KELVVAKAGV YYVFFQLELR RVVAGEGSGS VSLALHLQPL RSAAGAAALA LTVDLPPASS EARNSAFGFQ GRLLHLSAGQ RLGVHLHTEA RARHAWQLTQ GATVLGLFRV TPEIPAGLPS PRSE (SEQ ID NO: 197), where X is any amino acid other than Asp. In some cases, X is Ala;

[0382] PAGLLDLRQG MFAQLVAQNV LLIGGPLSWY SDPGLAGVSL TGGLSYKEDX KELVVAKAGV YYVFFQLELR RVVAGEGSGS VSLALHLQPL RSAAGAAALA LTVDLPPASS EARNSAFGFQ GRLLHLSAGQ RLGVHLHTEA RARHAWQLTQ GATVLGLFRV TPEIPAGLPS PRSE (SEQ ID NO: 198), where X is any amino acid other than Thr. In some cases, X is Ala;

[0383] PAGLLDLRQG MFAQLVAQNV LLIGGPLSWY SDPGLAGVSL TGGLSYKEDT XELVVAKAGV YYVFFQLELR RVVAGEGSGS VSLALHLQPL RSAAGAAALA LTVDLPPASS EARNSAFGFQ GRLLHLSAGQ RLGVHLHTEA RARHAWQLTQ GATVLGLFRV TPEIPAGLPS PRSE (SEQ ID NO: 199), where X is any amino acid other than Lys. In some cases, X is Ala;

[0384] PAGLLDLRQG MFAQLVAQNV LLIGGPLSWY SDPGLAGVSL TGGLSYKEDT KXLVVAKAGV YYVFFQLELR RVVAGEGSGS VSLALHLQPL RSAAGAAALA LTVDLPPASS EARNSAFGFQ GRLLHLSAGQ RLGVHLHTEA RARHAWQLTQ GATVLGLFRV TPEIPAGLPS PRSE (SEQ ID NO: 200), where X is any amino acid other than Glu. In some cases, X is Ala;

[0385] PAGLLDLRQG MFAQLVAQNV LLIGGPLSWY SDPGLAGVSL TGGLSYKEDT KELVVAKAGV YYVXFQLELR RVVAGEGSGS VSLALHLQPL RSAAGAAALA LTVDLPPASS EARNSAFGFQ GRLLHLSAGQ RLGVHLHTEA RARHAWQLTQ GATVLGLFRV TPEIPAGLPS PRSE (SEQ ID NO: 201), where X is any amino acid other than Phe. In some cases, X is Ala;

[0386] PAGLLDLRQG MFAQLVAQNV LLIGGPLSWY SDPGLAGVSL TGGLSYKEDT KELVVAKAGV YYVFXQLELR RVVAGEGSGS VSLALHLQPL RSAAGAAALA LTVDLPPASS EARNSAFGFQ GRLLHLSAGQ RLGVHLHTEA RARHAWQLTQ GATVLGLFRV TPEIPAGLPS PRSE (SEQ ID NO: 202), where X is any amino acid other than Phe. In some cases, X is Ala;

[0387] PAGLLDLRQG MFAQLVAQNV LLIGGPLSWY SDPGLAGVSL TGGLSYKEDT KELVVAKAGV YYVFFXLELR RVVAGEGSGS VSLALHLQPL RSAAGAAALA LTVDLPPASS EARNSAFGFQ GRLLHLSAGQ RLGVHLHTEA RARHAWQLTQ GATVLGLFRV TPEIPAGLPS PRSE (SEQ ID NO: 203), where X is any amino acid other than Gln. In some cases, X is Ala;

[0388] PAGLLDLRQG MFAQLVAQNV LLIGGPLSWY SDPGLAGVSL TGGLSYKEDT KELVVAKAGV YYVFFQXELR RVVAGEGSGS VSLALHLQPL RSAAGAAALA LTVDLPPASS EARNSAFGFQ GRLLHLSAGQ RLGVHLHTEA RARHAWQLTQ GATVLGLFRV TPEIPAGLPS PRSE (SEQ ID NO: 204), where X is any amino acid other than Leu. In some cases, X is Ala;

[0389] PAGLLDLRQG MFAQLVAQNV LLIGGPLSWY SDPGLAGVSL TGGLSYKEDT KELVVAKAGV YYVFFQLXLR RVVAGEGSGS VSLALHLQPL RSAAGAAALA LTVDLPPASS EARNSAFGFQ GRLLHLSAGQ RLGVHLHTEA RARHAWQLTQ GATVLGLFRV TPEIPAGLPS PRSE (SEQ ID NO: 205), where X is any amino acid other than Glu. In some cases, X is Ala;

[0390] PAGLLDLRQG MFAQLVAQNV LLIGGPLSWY SDPGLAGVSL TGGLSYKEDT KELVVAKAGV YYVFFQLEXR RVVAGEGSGS VSLALHLQPL RSAAGAAALA LTVDLPPASS EARNSAFGFQ GRLLHLSAGQ RLGVHLHTEA RARHAWQLTQ GATVLGLFRV TPEIPAGLPS PRSE (SEQ ID NO: 206), where X is any amino acid other than Leu. In some cases, X is Ala;

[0391] PAGLLDLRQG MFAQLVAQNV LLIGGPLSWY SDPGLAGVSL TGGLSYKEDT KELVVAKAGV YYVFFQLELX RVVAGEGSGS VSLALHLQPL RSAAGAAALA LTVDLPPASS EARNSAFGFQ GRLLHLSAGQ RLGVHLHTEA RARHAWQLTQ GATVLGLFRV TPEIPAGLPS PRSE (SEQ ID NO: 207), where X is any amino acid other than Arg. In some cases, X is Ala;

[0392] PAGLLDLRQG MFAQLVAQNV LLIGGPLSWY SDPGLAGVSL TGGLSYKEDT KELVVAKAGV YYVFFQLELR XVVAGEGSGS VSLALHLQPL RSAAGAAALA LTVDLPPASS EARNSAFGFQ GRLLHLSAGQ RLGVHLHTEA RARHAWQLTQ GATVLGLFRV TPEIPAGLPS PRSE (SEQ ID NO: 208), where X is any amino acid other than Arg. In some cases, X is Ala;

[0393] PAGLLDLRQG MFAQLVAQNV LLIGGPLSWY SDPGLAGVSL TGGLSYKEDT KELVVAKAGV YYVFFQLELR RXVAGEGSGS VSLALHLQPL RSAAGAAALA LTVDLPPASS EARNSAFGFQ GRLLHLSAGQ RLGVHLHTEA RARHAWQLTQ GATVLGLFRV TPEIPAGLPS PRSE (SEQ ID NO: 209), where X is any amino acid other than Val. In some cases, X is Ala;

[0394] PAGLLDLRQG MFAQLVAQNV LLIGGPLSWY SDPGLAGVSL TGGLSYKEDT KELVVAKAGV YYVFFQLELR RVXAGEGSGS VSLALHLQPL RSAAGAAALA LTVDLPPASS EARNSAFGFQ GRLLHLSAGQ RLGVHLHTEA RARHAWQLTQ GATVLGLFRV TPEIPAGLPS PRSE (SEQ ID NO: 210), where X is any amino acid other than Val. In some cases, X is Ala;

[0395] PAGLLDLRQG MFAQLVAQNV LLIGGPLSWY SDPGLAGVSL TGGLSYKEDT KELVVAKAGV YYVFFQLELR RVVAXEGSGS VSLALHLQPL RSAAGAAALA LTVDLPPASS EARNSAFGFQ GRLLHLSAGQ RLGVHLHTEA RARHAWQLTQ GATVLGLFRV TPEIPAGLPS PRSE (SEQ ID NO: 211), where X is any amino acid other than Gly. In some cases, X is Ala;

[0396] PAGLLDLRQG MFAQLVAQNV LLIGGPLSWY SDPGLAGVSL TGGLSYKEDT KELVVAKAGV YYVFFQLELR RVVAGXGSGS VSLALHLQPL RSAAGAAALA LTVDLPPASS EARNSAFGFQ GRLLHLSAGQ RLGVHLHTEA RARHAWQLTQ GATVLGLFRV TPEIPAGLPS PRSE (SEQ ID NO: 212), where X is any amino acid other than Glu. In some cases, X is Ala;

[0397] PAGLLDLRQG MFAQLVAQNV LLIGGPLSWY SDPGLAGVSL TGGLSYKEDT KELVVAKAGV YYVFFQLELR RVVAGEXSGS VSLALHLQPL RSAAGAAALA LTVDLPPASS EARNSAFGFQ GRLLHLSAGQ RLGVHLHTEA RARHAWQLTQ GATVLGLFRV TPEIPAGLPS PRSE (SEQ ID NO: 213), where X is any amino acid other than Gly. In some cases, X is Ala;

[0398] PAGLLDLRQG MFAQLVAQNV LLIGGPLSWY SDPGLAGVSL TGGLSYKEDT KELVVAKAGV YYVFFQLELR RVVAGEGXGS VSLALHLQPL RSAAGAAALA LTVDLPPASS EARNSAFGFQ GRLLHLSAGQ RLGVHLHTEA RARHAWQLTQ GATVLGLFRV TPEIPAGLPS PRSE (SEQ ID NO: 214), where X is any amino acid other than Ser. In some cases, X is Ala;

[0399] PAGLLDLRQG MFAQLVAQNV LLIGGPLSWY SDPGLAGVSL TGGLSYKEDT KELVVAKAGV YYVFFQLELR RVVAGEGSGS VSLALHLQPL RSAAGAAALA LTVXLPPASS EARNSAFGFQ GRLLHLSAGQ RLGVHLHTEA RARHAWQLTQ GATVLGLFRV TPEIPAGLPS PRSE (SEQ ID NO: 215), where X is any amino acid other than Asp. In some cases, X is Ala;

[0400] PAGLLDLRQG MFAQLVAQNV LLIGGPLSWY SDPGLAGVSL TGGLSYKEDT KELVVAKAGV YYVFFQLELR RVVAGEGSGS VSLALHLQPL RSAAGAAALA LTVDXPPASS EARNSAFGFQ GRLLHLSAGQ RLGVHLHTEA RARHAWQLTQ GATVLGLFRV TPEIPAGLPS PRSE (SEQ ID NO: 216), where X is any amino acid other than Leu. In some cases, X is Ala;

[0401] PAGLLDLRQG MFAQLVAQNV LLIGGPLSWY SDPGLAGVSL TGGLSYKEDT KELVVAKAGV YYVFFQLELR RVVAGEGSGS VSLALHLQPL RSAAGAAALA LTVDLXPASS EARNSAFGFQ GRLLHLSAGQ RLGVHLHTEA RARHAWQLTQ GATVLGLFRV TPEIPAGLPS PRSE (SEQ ID NO: 217), where X is any amino acid other than Pro. In some cases, X is Ala;

[0402] PAGLLDLRQG MFAQLVAQNV LLIGGPLSWY SDPGLAGVSL TGGLSYKEDT KELVVAKAGV YYVFFQLELR RVVAGEGSGS VSLALHLQPL RSAAGAAALA LTVDLPPAXS EARNSAFGFQ GRLLHLSAGQ RLGVHLHTEA RARHAWQLTQ GATVLGLFRV TPEIPAGLPS PRSE (SEQ ID NO: 218), where X is any amino acid other than Ser. In some cases, X is Ala;

[0403] PAGLLDLRQG MFAQLVAQNV LLIGGPLSWY SDPGLAGVSL TGGLSYKEDT KELVVAKAGV YYVFFQLELR RVVAGEGSGS VSLALHLQPL RSAAGAAALA LTVDLPPASX EARNSAFGFQ GRLLHLSAGQ RLGVHLHTEA RARHAWQLTQ GATVLGLFRV TPEIPAGLPS PRSE (SEQ ID NO: 219), where X is any amino acid other than Ser. In some cases, X is Ala;

[0404] PAGLLDLRQG MFAQLVAQNV LLIGGPLSWY SDPGLAGVSL TGGLSYKEDT KELVVAKAGV YYVFFQLELR RVVAGEGSGS VSLALHLQPL RSAAGAAALA LTVDLPPASS XARNSAFGFQ GRLLHLSAGQ RLGVHLHTEA RARHAWQLTQ GATVLGLFRV TPEIPAGLPS PRSE (SEQ ID NO: 220), where X is any amino acid other than Glu. In some cases, X is Ala;

[0405] PAGLLDLRQG MFAQLVAQNV LLIGGPLSWY SDPGLAGVSL TGGLSYKEDT KELVVAKAGV YYVFFQLELR RVVAGEGSGS VSLALHLQPL RSAAGAAALA LTVDLPPASS EAXNSAFGFQ GRLLHLSAGQ RLGVHLHTEA RARHAWQLTQ GATVLGLFRV TPEIPAGLPS PRSE (SEQ ID NO: 221), where X is any amino acid other than Arg. In some cases, X is Ala;

[0406] PAGLLDLRQG MFAQLVAQNV LLIGGPLSWY SDPGLAGVSL TGGLSYKEDT KELVVAKAGV YYVFFQLELR RVVAGEGSGS VSLALHLQPL RSAAGAAALA LTVDLPPASS EARXSAFGFQ GRLLHLSAGQ RLGVHLHTEA RARHAWQLTQ GATVLGLFRV TPEIPAGLPS PRSE (SEQ ID NO: 222), where X is any amino acid other than Asn. In some cases, X is Ala;

[0407] PAGLLDLRQG MFAQLVAQNV LLIGGPLSWY SDPGLAGVSL TGGLSYKEDT KELVVAKAGV YYVFFQLELR RVVAGEGSGS VSLALHLQPL RSAAGAAALA LTVDLPPASS EARNXAFGFQ GRLLHLSAGQ RLGVHLHTEA RARHAWQLTQ GATVLGLFRV TPEIPAGLPS PRSE (SEQ ID NO: 223), where X is any amino acid other than Ser. In some cases, X is Ala;

[0408] PAGLLDLRQG MFAQLVAQNV LLIGGPLSWY SDPGLAGVSL TGGLSYKEDT KELVVAKAGV YYVFFQLELR RVVAGEGSGS VSLALHLQPL RSAAGAAALA LTVDLPPASS EARNSAXGFQ GRLLHLSAGQ RLGVHLHTEA RARHAWQLTQ GATVLGLFRV TPEIPAGLPS PRSE (SEQ ID NO: 224), where X is any amino acid other than Phe. In some cases, X is Ala;

[0409] PAGLLDLRQG MFAQLVAQNV LLIGGPLSWY SDPGLAGVSL TGGLSYKEDT KELVVAKAGV YYVFFQLELR RVVAGEGSGS VSLALHLQPL RSAAGAAALA LTVDLPPASS EARNSAFGFQ GRLLHLSAGX RLGVHLHTEA RARHAWQLTQ GATVLGLFRV TPEIPAGLPS PRSE (SEQ ID NO: 225), where X is any amino acid other than Gln. In some cases, X is Ala;

[0410] PAGLLDLRQG MFAQLVAQNV LLIGGPLSWY SDPGLAGVSL TGGLSYKEDT KELVVAKAGV YYVFFQLELR RVVAGEGSGS VSLALHLQPL RSAAGAAALA LTVDLPPASS EARNSAFGFQ GRLLHLSAGQ XLGVHLHTEA RARHAWQLTQ GATVLGLFRV TPEIPAGLPS PRSE (SEQ ID NO: 226), where X is any amino acid other than Arg. In some cases, X is Ala;

[0411] PAGLLDLRQG MFAQLVAQNV LLIGGPLSWY SDPGLAGVSL TGGLSYKEDT KELVVAKAGV YYVFFQLELR RVVAGEGSGS VSLALHLQPL RSAAGAAALA LTVDLPPASS EARNSAFGFQ GRLLHLSAGQ RXGVHLHTEA RARHAWQLTQ GATVLGLFRV TPEIPAGLPS PRSE (SEQ ID NO: 227), where X is any amino acid other than Leu. In some cases, X is Ala;

[0412] PAGLLDLRQG MFAQLVAQNV LLIGGPLSWY SDPGLAGVSL TGGLSYKEDT KELVVAKAGV YYVFFQLELR RVVAGEGSGS VSLALHLQPL RSAAGAAALA LTVDLPPASS EARNSAFGFQ GRLLHLSAGQ RLXVHLHTEA RARHAWQLTQ GATVLGLFRV TPEIPAGLPS PRSE (SEQ ID NO: 228), where X is any amino acid other than Gly. In some cases, X is Ala;

[0413] PAGLLDLRQG MFAQLVAQNV LLIGGPLSWY SDPGLAGVSL TGGLSYKEDT KELVVAKAGV YYVFFQLELR RVVAGEGSGS VSLALHLQPL RSAAGAAALA LTVDLPPASS EARNSAFGFQ GRLLHLSAGQ RLGXHLHTEA RARHAWQLTQ GATVLGLFRV TPEIPAGLPS PRSE (SEQ ID NO: 229), where X is any amino acid other than Val. In some cases, X is Ala;

[0414] PAGLLDLRQG MFAQLVAQNV LLIGGPLSWY SDPGLAGVSL TGGLSYKEDT KELVVAKAGV YYVFFQLELR RVVAGEGSGS VSLALHLQPL RSAAGAAALA LTVDLPPASS EARNSAFGFQ GRLLHLSAGQ RLGVXLHTEA RARHAWQLTQ GATVLGLFRV TPEIPAGLPS PRSE (SEQ ID NO: 230), where X is any amino acid other than His. In some cases, X is Ala;

[0415] PAGLLDLRQG MFAQLVAQNV LLIGGPLSWY SDPGLAGVSL TGGLSYKEDT KELVVAKAGV YYVFFQLELR RVVAGEGSGS VSLALHLQPL RSAAGAAALA LTVDLPPASS EARNSAFGFQ GRLLHLSAGQ RLGVHXHTEA RARHAWQLTQ GATVLGLFRV TPEIPAGLPS PRSE (SEQ ID NO: 231), where X is any amino acid other than Leu. In some cases, X is Ala;

[0416] PAGLLDLRQG MFAQLVAQNV LLIGGPLSWY SDPGLAGVSL TGGLSYKEDT KELVVAKAGV YYVFFQLELR RVVAGEGSGS VSLALHLQPL RSAAGAAALA LTVDLPPASS EARNSAFGFQ GRLLHLSAGQ RLGVHLXTEA RARHAWQLTQ GATVLGLFRV TPEIPAGLPS PRSE (SEQ ID NO: 232), where X is any amino acid other than His. In some cases, X is Ala;

[0417] PAGLLDLRQG MFAQLVAQNV LLIGGPLSWY SDPGLAGVSL TGGLSYKEDT KELVVAKAGV YYVFFQLELR RVVAGEGSGS VSLALHLQPL RSAAGAAALA LTVDLPPASS EARNSAFGFQ GRLLHLSAGQ RLGVHLHXEA RARHAWQLTQ GATVLGLFRV TPEIPAGLPS PRSE (SEQ ID NO: 233), where X is any amino acid other than Thr. In some cases, X is Ala;

[0418] PAGLLDLRQG MFAQLVAQNV LLIGGPLSWY SDPGLAGVSL TGGLSYKEDT KELVVAKAGV YYVFFQLELR RVVAGEGSGS VSLALHLQPL RSAAGAAALA LTVDLPPASS EARNSAFGFQ GRLLHLSAGQ RLGVHLHTXA RARHAWQLTQ GATVLGLFRV TPEIPAGLPS PRSE (SEQ ID NO: 234), where X is any amino acid other than Glu. In some cases, X is Ala;

[0419] PAGLLDLRQG MFAQLVAQNV LLIGGPLSWY SDPGLAGVSL TGGLSYKEDT KELVVAKAGV YYVFFQLELR RVVAGEGSGS VSLALHLQPL RSAAGAAALA LTVDLPPASS EARNSAFGFQ GRLLHLSAGQ RLGVHLHTEA XARHAWQLTQ GATVLGLFRV TPEIPAGLPS PRSE (SEQ ID NO: 235), where X is any amino acid other than Arg. In some cases, X is Ala;

[0420] PAGLLDLRQG MFAQLVAQNV LLIGGPLSWY SDPGLAGVSL TGGLSYKEDT KELVVAKAGV YYVFFQLELR RVVAGEGSGS VSLALHLQPL RSAAGAAALA LTVDLPPASS EARNSAFGFQ GRLLHLSAGQ RLGVHLHTEA RAXHAWQLTQ GATVLGLFRV TPEIPAGLPS PRSE (SEQ ID NO: 236), where X is any amino acid other than Arg. In some cases, X is Ala;

[0421] PAGLLDLRQG MFAQLVAQNV LLIGGPLSWY SDPGLAGVSL TGGLSYKEDT KELVVAKAGV YYVFFQLELR RVVAGEGSGS VSLALHLQPL RSAAGAAALA LTVDLPPASS EARNSAFGFQ GRLLHLSAGQ RLGVHLHTEA RARXAWQLTQ GATVLGLFRV TPEIPAGLPS PRSE (SEQ ID NO: 237), where X is any amino acid other than His. In some cases, X is Ala;

[0422] PAGLLDLRQG MFAQLVAQNV LLIGGPLSWY SDPGLAGVSL TGGLSYKEDT KELVVAKAGV YYVFFQLELR RVVAGEGSGS VSLALHLQPL RSAAGAAALA LTVDLPPASS EARNSAFGFQ GRLLHLSAGQ RLGVHLHTEA RARHAXQLTQ GATVLGLFRV TPEIPAGLPS PRSE (SEQ ID NO: 238), where X is any amino acid other than Trp. In some cases, X is Ala;

[0423] PAGLLDLRQG MFAQLVAQNV LLIGGPLSWY SDPGLAGVSL TGGLSYKEDT KELVVAKAGV YYVFFQLELR RVVAGEGSGS VSLALHLQPL RSAAGAAALA LTVDLPPASS EARNSAFGFQ GRLLHLSAGQ RLGVHLHTEA RARHAWQXTQ GATVLGLFRV TPEIPAGLPS PRSE (SEQ ID NO: 239), where X is any amino acid other than Leu. In some cases, X is Ala;

[0424] PAGLLDLRQG MFAQLVAQNV LLIGGPLSWY SDPGLAGVSL TGGLSYKEDT KELVVAKAGV YYVFFQLELR RVVAGEGSGS VSLALHLQPL RSAAGAAALA LTVDLPPASS EARNSAFGFQ GRLLHLSAGQ RLGVHLHTEA RARHAWQLXQ GATVLGLFRV TPEIPAGLPS PRSE (SEQ ID NO: 240), where X is any amino acid other than Thr. In some cases, X is Ala;

[0425] PAGLLDLRQG MFAQLVAQNV LLIGGPLSWY SDPGLAGVSL TGGLSYKEDT KELVVAKAGV YYVFFQLELR RVVAGEGSGS VSLALHLQPL RSAAGAAALA LTVDLPPASS EARNSAFGFQ GRLLHLSAGQ RLGVHLHTEA RARHAWQLTX GATVLGLFRV TPEIPAGLPS PRSE (SEQ ID NO: 241), where X is any amino acid other than Gln. In some cases, X is Ala;

[0426] PAGLLDLRQG MFAQLVAQNV LLIGGPLSWY SDPGLAGVSL TGGLSYKEDT KELVVAKAGV YYVFFQLELR RVVAGEGSGS VSLALHLQPL RSAAGAAALA LTVDLPPASS EARNSAFGFQ GRLLHLSAGQ RLGVHLHTEA RARHAWQLTQ XATVLGLFRV TPEIPAGLPS PRSE (SEQ ID NO: 242), where X is any amino acid other than Gly. In some cases, X is Ala;

[0427] PAGLLDLRQG MFAQLVAQNV LLIGGPLSWY SDPGLAGVSL TGGLSYKEDT KELVVAKAGV YYVFFQLELR RVVAGEGSGS VSLALHLQPL RSAAGAAALA LTVDLPPASS EARNSAFGFQ GRLLHLSAGQ RLGVHLHTEA RARHAWQLTQ GAXVLGLFRV TPEIPAGLPS PRSE (SEQ ID NO: 243), where X is any amino acid other than Thr. In some cases, X is Ala; and

[0428] PAGLLDLRQG MFAQLVAQNV LLIGGPLSWY SDPGLAGVSL TGGLSYKEDT KELVVAKAGV YYVFFQLELR RVVAGEGSGS VSLALHLQPL RSAAGAAALA LTVDLPPASS EARNSAFGFQ GRLLHLSAGQ RLGVHLHTEA RARHAWQLTQ GATXLGLFRV TPEIPAGLPS PRSE (SEQ ID NO: 244), where X is any amino acid other than Val. In some cases, X is Ala.

### IL-2 Variants

[0429] In some cases, a variant immunomodulatory polypeptide present in a TMAPP of the present disclosure is a variant IL-2 polypeptide. Wild-type IL-2 binds to IL-2 receptor (IL-2R).

[0430] A wild-type IL-2 amino acid sequence can be as follows: APTSSSTKKT QLQLEHLLLD LQMILNGINN YKNPKLTRML TFKFYMPKKA TELKHLQCLEEELKPLEEVL NLAQSKNFHL RPRDLISNIN VIVLELKGSE TTFMCEYADE TATIVEFLNRWITFCOSIIS TLT (SEQ ID NO: 245).

[0431] Wild-type IL2 binds to an IL2 receptor (IL2R) on the surface of a cell. An IL2 receptor is in some cases a heterotrimeric polypeptide comprising an alpha chain (IL-2Ra; also referred to as CD25), a beta chain (IL-2RD; also referred to as CD122: and a gamma chain (IL-2Rγ; also referred to as CD132). Amino acid sequences of human IL-2Rα, IL2Rβ, and IL-2Rγ can be as follows.

Human IL-2Rα:
(SEQ ID NO: 246)
ELCDDDPPE IPHATFKAMA YKEGTMLNCE CKRGFRRIKS
GSLYMLCTGN SSHSSWDNQC QCTSSATRNT TKQVTPQPEE
QKERKTTEMQ SPMQPVDQAS LPGHCREPPP WENEATERIY
HFVVGQMVYY QCVQGYRALH RGPAESVCKM THGKTRWTQP
QLICTGEMET SQFPGEEKPQ ASPEGRPESE TSCLVTTTDF
QIQTEMAATM ETSIFTTEYQ VAVAGCVFLL ISVLLLSGLT
WQRRQRKSRR TI.
Human IL-2Rβ:
(SEQ ID NO: 247)
VNG TSQFTCFYNS RANISCVWSQ DGALQDTSCQ
VHAWPDRRRW NQTCELLPVS QASWACNLIL GAPDSQKLTT
VDIVTLRVLC REGVRWRVMA IQDFKPFENL RLMAPISLQV
VHVETHRCNI SWEISQASHY FERHLEFEAR TLSPGHTWEE
APLLTLKQKQ EWICLETLTP DTQYEFQVRV KPLQGEFTTW
SPWSQPLAFR TKPAALGKDT IPWLGHLLVG LSGAFGFIIL
VYLLINCRNT GPWLKKVLKC NTPDPSKFFS QLSSEHGGDV
QKWLSSPFPS SSFSPGGLAP EISPLEVLER DKVTQLLLQQ
DKVPEPASLS SNHSLTSCFT NQGYFFFHLP DALEIEACQV
YFTYDPYSEE DPDEGVAGAP TGSSPQPLQP LSGEDDAYCT
FPSRDDLLLF SPSLLGGPSP PSTAPGGSGA GEERMPPSLQ
ERVPRDWDPQ PLGPPTPGVP DLVDFQPPPE LVLREAGEEV
PDAGPREGVS FPWSRPPGQG EFRALNARLP LNTDAYLSLQ
ELQGQDPTHL V.
Human IL-2Rγ:
(SEQ ID NO: 248)
LNTTILTP NGNEDTTADF FLTTMPTDSL SVSTLPLPEV
QCFVFNVEYM NCTWNSSSEP QPTNLTLHYW YKNSDNDKVQ
KCSHYLFSEE ITSGCQLQKK EIHLYQTFVV QLQDPREPRR
QATQMLKLQN LVIPWAPENL TLHKLSESQL ELNWNNRFLN
HCLEHLVQYR TDWDHSWTEQ SVDYRHKFSL PSVDGQKRYT
FRVRSRFNPL CGSAQHWSEW SHPIHWGSNT SKENPFLFAL
EAVVISVGSM GLIISLLCVY FWLERTMPRI PTLKNLEDLV
TEYHGNFSAW SGVSKGLAES LQPDYSERLC LVSEIPPKGG
ALGEGPGASP CNQHSPYWAP PCYTLKPET.

[0432] In some cases, where a TMAPP of the present disclosure comprises a variant IL-2 polypeptide, a “cognate co-immunomodulatory polypeptide” is an IL-2R comprising polypeptides comprising the amino acid sequences of SEQ ID NO: 246, 247, and 248.

[0433] In some cases, a variant IL-2 polypeptide exhibits reduced binding affinity to IL-2R, compared to the binding affinity of a IL-2 polypeptide comprising the amino acid sequence set forth in SEQ ID NO: 245. For example, in some cases, a variant IL-2 polypeptide binds IL-2R with a binding affinity that is at least 10% less, at least 15% less, at least 20% less, at least 25%, at least 30% less, at least 35% less, at least 40% less, at least 45% less, at least 50% less, at least 55% less, at least 60% less, at least 65% less, at least 70% less, at least 75% less, at least 80% less, at least 85% less, at least 90% less, at least 95% less, or more than 95% less, than the binding affinity of an IL-2 polypeptide comprising the amino acid sequence set forth in SEQ ID NO: 245 for an IL-2R (e.g., an IL-2R comprising polypeptides comprising the amino acid sequence set forth in SEQ ID NOs: 246-248), when assayed under the same conditions.

[0434] In some cases, a variant IL-2 polypeptide has a binding affinity to IL-2R that is from 100 nM to 100 μM. As another example, in some cases, a variant IL-2 polypeptide has a binding affinity for IL-2R (e.g., an IL-2R comprising polypeptides comprising the amino acid sequence set forth in SEQ ID NOs: 246-248) that is from about 100 nM to 150 nM, from about 150 nM to about 200 nM, from about 200 nM to about 250 nM, from about 250 nM to about 300 nM, from about 300 nM to about 350 nM, from about 350 nM to about 400 nM, from about 400 nM to about 500 nM, from about 500 nM to about 600 nM, from about 600 nM to about 700 nM, from about 700 nM to about 800 nM, from about 800 nM to about 900 nM, from about 900 nM to about 1 μM, to about 1 μM to about 5 μM, from about 5 μM to about 10 μM, from about 10 μM to about 15 μM, from about 15 μM to about 20 μM, from about 20 μM to about 25 μM, from about 25 μM to about 50 μM, from about 50 μM to about 75 μM, or from about 75 μM to about 100 μM.

[0435] In some cases, a variant IL-2 polypeptide has a single amino acid substitution compared to the IL-2 amino acid sequence set forth in SEQ ID NO: 245. In some cases, a variant IL-2 polypeptide has from 2 to 10 amino acid substitutions compared to the IL-2 amino acid sequence set forth in SEQ ID NO: 245. In some cases, a variant IL-2 polypeptide has 2 amino acid substitutions compared to the IL-2 amino acid sequence set forth in SEQ ID NO: 245. In some cases, a variant IL-2 polypeptide has 3 amino acid substitutions compared to the IL-2 amino acid sequence set forth in SEQ ID NO: 245. In some cases, a variant IL-2 polypeptide has 4 amino acid substitutions compared to the IL-2 amino acid sequence set forth in SEQ ID NO: 245. In some cases, a variant IL-2 polypeptide has 5 amino acid substitutions compared to the IL-2 amino acid sequence set forth in SEQ ID NO: 245. In some cases, a variant IL-2 polypeptide has 6 amino acid substitutions compared to the IL-2 amino acid sequence set forth in SEQ ID NO: 245. In some cases, a variant IL-2 polypeptide has 7 amino acid substitutions compared to the IL-2 amino acid sequence set forth in SEQ ID NO: 245. In some cases, a variant IL-2 polypeptide has 8 amino acid substitutions compared to the IL-2 amino acid sequence set forth in SEQ ID NO: 245. In some cases, a variant IL-2 polypeptide has 9 amino acid substitutions compared to the IL-2 amino acid sequence set forth in SEQ ID NO: 245. In some cases, a variant IL-2 polypeptide has 10 amino acid substitutions compared to the IL-2 amino acid sequence set forth in SEQ ID NO: 245.

[0436] Suitable IL-2 variants include a polypeptide that comprises an amino acid sequence having at least 60%, at least 70%, at least 80%, at least 90%, at least 95%, at least 98%, at least 99%, or 100%, amino acid sequence identity to any one of the following amino acid sequences:

[0437] APTSSSTKKT QLQLEHLLLD LQMILNGINN YKNPKLTRML TXKFYMPKKA TELKHLQCLE EELKPLEEVL NLAQSKNFHL RPRDLISNIN VIVLELKGSE TTFMCEYADE TATIVEFLNR WITFCQSIIS TLT (SEQ ID NO: 249), where X is any amino acid other than Phe. In some cases, X is Ala;

[0438] APTSSSTKKT QLQLEHLLLX LQMILNGINN YKNPKLTRML TFKFYMPKKA TELKHLQCLE EELKPLEEVL NLAQSKNFHL RPRDLISNIN VIVLELKGSE TTFMCEYADE TATIVEFLNR WITFCQSI IS TLT (SEQ ID NO: 250), where X is any amino acid other than Asp. In some cases, X is Ala;

[0439] APTSSSTKKT QLQLXHLLLD LQMILNGINN YKNPKLTRML TFKFYMPKKA TELKHLQCLE EELKPLEEVL NLAQSKNFHL RPRDLISNIN VIVLELKGSE TTFMCEYADE TATIVEFLNR WITFCQSIIS TLT (SEQ ID NO: 251), where X is any amino acid other than Glu. In some cases, X is Ala;

[0440] APTSSSTKKT QLQLEXLLLD LQMILNGINN YKNPKLTRML TFKFYMPKKA TELKHLQCLE EELKPLEEVL NLAQSKNFHL RPRDLISNIN VIVLELKGSE TTFMCEYADE TATIVEFLNR WITFCQSIIS TLT (SEQ ID NO: 252), where X is any amino acid other than His. In some cases, X is Ala. In some cases, X is Arg. In some cases, X is Asn. In some cases, X is Asp. In some cases, X is Cys. In some cases, X is Glu. In some cases, X is Gln.

[0441] In some cases, X is Gly. In some cases, X is Ile. In some cases, X is Lys. In some cases, X is Leu. In some cases, X is Met. In some cases, X is Phe. In some cases, X is Pro. In some cases, X is Ser. In some cases, X is Thr. In some cases, X is Tyr. In some cases, X is Trp. In some cases, X is Val;

[0442] APTSSSTKKT QLQLEHLLLD LQMILNGINN YKNPKLTRML TFKFXMPKKA TELKHLQCLE EELKPLEEVL NLAQSKNFHL RPRDLISNIN VIVLELKGSE TTFMCEYADE TATIVEFLNR WITFCQSIIS TLT (SEQ ID NO: 253), where X is any amino acid other than Tyr. In some cases, X is Ala;

[0443] APTSSSTKKT QLQLEHLLLD LQMILNGINN YKNPKLTRML TFKFYMPKKA TELKHLQCLE EELKPLEEVL NLAQSKNFHL RPRDLISNIN VIVLELKGSE TTFMCEYADE TATIVEFLNR WITFCXSIIS TLT (SEQ ID NO: 254), where X is any amino acid other than Gln. In some cases, X is Ala;

[0444] APTSSSTKKT QLQLEX₁LLLD LQMILNGINN YKNPKLTRML TX₂KFYMPKKA TELKHLQCLE EELKPLEEVL NLAQSKNFHL RPRDLISNIN VIVLELKGSE TTFMCEYADE TATIVEFLNR WITFCQSIIS TLT (SEQ ID NO: 255), where X₁ is any amino acid other than His, and where X₂ is any amino acid other than Phe. In some cases, X₁ is Ala. In some cases, X₂ is Ala. In some cases, X₁ is Ala; and X₂ is Ala. In some cases, X₁ is Thr; and X₂ is Ala;

[0445] APTSSSTKKT QLQLEHLLLX₁ LQMILNGINN YKNPKLTRML TX₂KFYMPKKA TELKHLQCLE EELKPLEEVL NLAQSKNFHL RPRDLISNIN VIVLELKGSE TTFMCEYADE TATIVEFLNR WITFCQSIIS TLT (SEQ ID NO: 256), where X₁ is any amino acid other than Asp; and where X₂ is any amino acid other than Phe. In some cases, X₁ is Ala. In some cases, X₂ is Ala. In some cases, X₁ is Ala; and X₂ is Ala;

[0446] APTSSSTKKT QLQLX₁HLLLX₂ LQMILNGINN YKNPKLTRML TX₃KFYMPKKA TELKHLQCLE EELKPLEEVL NLAQSKNFHL RPRDLISNIN VIVLELKGSE TTFMCEYADE TATIVEFLNR WITFCQSIIS TLT (SEQ ID NO: 257), where X₁ is any amino acid other than Glu; where X₂ is any amino acid other than Asp; and where X₃ is any amino acid other than Phe. In some cases, X₁ is Ala. In some cases, X₂ is Ala. In some cases, X₃ is Ala. In some cases, X₁ is Ala; X₂ is Ala; and X₃ is Ala;

[0447] APTSSSTKKT QLQLEX₁LLLX₂ LQMILNGINN YKNPKLTRML TX₃KFYMPKKA TELKHLQCLE EELKPLEEVL NLAQSKNFHL RPRDLISNIN VIVLELKGSE TTFMCEYADE TATIVEFLNR WITFCQSIIS TLT (SEQ ID NO: 258), where X₁ is any amino acid other than His; where X₂ is any amino acid other than Asp; and where X₃ is any amino acid other than Phe. In some cases, X₁ is Ala. In some cases, X₂ is Ala. In some cases, X₃ is Ala. In some cases, X₁ is Ala; X₂ is Ala; and X₃ is Ala;

[0448] APTSSSTKKT QLQLEHLLLX₁ LQMILNGINN YKNPKLTRML TX₂KFYMPKKA TELKHLQCLE EELKPLEEVL NLAQSKNFHL RPRDLISNIN VIVLELKGSE TTFMCEYADE TATIVEFLNR WITFCX₃SIIS TLT (SEQ ID NO: 259), where X₁ is any amino acid other than Asp; where X₂ is any amino acid other than Phe; and where X₃ is any amino acid other than Gln. In some cases, X₁ is Ala. In some cases, X₂ is Ala. In some cases, X₃ is Ala. In some cases, X₁ is Ala; X₂ is Ala; and X₃ is Ala;

[0449] APTSSSTKKT QLQLEHLLLX₁ LQMILNGINN YKNPKLTRML TX₂KFX₃MPKKA TELKHLQCLE EELKPLEEVL NLAQSKNFHL RPRDLISNIN VIVLELKGSE TTFMCEYADE TATIVEFLNR WITFCQSIIS TLT (SEQ ID NO: 260), where X1 is any amino acid other than Asp; where X₂ is any amino acid other than Phe; and where X₃ is any amino acid other than Tyr. In some cases, X₁ is Ala. In some cases, X₂ is Ala. In some cases, X₃ is Ala. In some cases, X₁ is Ala; X₂ is Ala; and X₃ is Ala;

[0450] APTSSSTKKT QLQLEX₁LLLX₂ LQMILNGINN YKNPKLTRML TX₃KFX₄MPKKA TELKHLQCLE EELKPLEEVL NLAQSKNFHL RPRDLISNIN VIVLELKGSE TTFMCEYADE TATIVEFLNR WITFCQSIIS TLT (SEQ ID NO: 261), where X1 is any amino acid other than His; where X₂ is any amino acid other than Asp; where X₃ is any amino acid other than Phe; and where X₄ is any amino acid other than Tyr. In some cases, X₁ is Ala. In some cases, X₂ is Ala. In some cases, X₃ is Ala. In some cases, X₄ is Ala. In some cases, X1 is Ala; X₂ is Ala; X₃ is Ala; and X₄ is Ala;

[0451] APTSSSTKKT QLQLEHLLLX₁ LQMILNGINN YKNPKLTRML TX₂KFX₃MPKKA TELKHLQCLE EELKPLEEVL NLAQSKNFHL RPRDLISNIN VIVLELKGSE TTFMCEYADE TATIVEFLNR WITFCX₄SI IS TLT (SEQ ID NO: 262), where X₁ is any amino acid other than Asp; where X₂ is any amino acid other than Phe; where X₃ is any amino acid other than Tyr; and where X₄ is any amino acid other than Gln. In some cases, X₁ is Ala. In some cases, X₂ is Ala. In some cases, X₃ is Ala. In some cases, X₄ is Ala. In some cases, X₁ is Ala; X₂ is Ala; X₃ is Ala; and X₄ is Ala;

[0452] APTSSSTKKT QLQLEX₁LLLX₂ LQMILNGINN YKNPKLTRML TX₃KFX₄MPKKA TELKHLQCLE EELKPLEEVL NLAQSKNFHL RPRDLISNIN VIVLELKGSE TTFMCEYADE TATIVEFLNR WITFCX₃SIIS TLT (SEQ ID NO: 263), where X₁ is any amino acid other than His; where X₂ is any amino acid other than Asp; where X₃ is any amino acid other than Phe; where X₄ is any amino acid other than Tyr; and where X₅ is any amino acid other than Gln. In some cases, X₁ is Ala. In some cases, X₂ is Ala. In some cases, X₃ is Ala. In some cases, X₄ is Ala. In some cases, X₅ is Ala. In some cases, X₁ is Ala; X₂ is Ala; X₃ is Ala; X₄ is Ala; X₅ is Ala; and

[0453] APTSSSTKKT QLQLEX₁LLLD LQMILNGINN YKNPKLTRML TX₂KFYMPKKA TELKHLQCLE EELKPLEEVL NLAQSKNFHL RPRDLISNIN VIVLELKGSE TTFMCEYADE TATIVEFLNR WITFCX₃SIIS TLT (SEQ ID NO: 264), where X₁ is any amino acid other than His; where X₂ is any amino acid other than Phe; and where X₃ is any amino acid other than Gln. In some cases, X1 is Ala. In some cases, X₂ is Ala. In some cases, X₃ is Ala. In some cases, X₁ is Ala; X₂ is Ala; and X₃ is Ala.

### TGF-β

[0454] As noted above, in some cases, the immunomodulatory polypeptide present in a TMAPP of the present disclosure is a TGF-β polypeptide. Amino acid sequences of TGF-β polypeptides are known in the art. In some cases, the immunomodulatory polypeptide present in a TMAPP of the present disclosure is a TGF-β1 polypeptide. immunomodulatory polypeptide present in a TMAPP of the present disclosure is a TGF-β2 polypeptide. immunomodulatory polypeptide present in a TMAPP of the present disclosure is a TGF-β3 polypeptide. A suitable TGF-β polypeptide can comprise an amino acid sequence having at least 60%, at least 70%, at least 80%, at least 90%, at least 95%, at least 98%, at least 99%, or 100%, amino acid sequence identity to the mature form of a human TGF-β1 polypeptide, a human TGF-β2 polypeptide, or a human TGF-β3 polypeptide. A suitable TGF-β polypeptide can have a length of from about 100 amino acids to about 125 amino acids; for example, a suitable TGF-β polypeptide can have a length of from about 100 amino acids to about 105 amino acids, from about 105 amino acids to about 110 amino acids, from about 110 amino acids to about 115 amino acids, from about 115 amino acids to about 120 amino acids, or from about 120 amino acids to about 125 amino acids.

[0455] A suitable TGF-β1 polypeptide can comprise an amino acid sequence having at least 60%, at least 70%, at least 80%, at least 90%, at least 95%, at least 98%, at least 99%, or 100%, amino acid sequence identity to the following TGF-β1 amino acid sequence: AL DTNYCFSSTE KNCCVRQLYI DFRKDLGWKW IHEPKGYHAN FCLGPCPYIW SLDTQYSKVL ALYNQHNPGA SAAPCCVPQA LEPLPIVYYV GRKPKVEQLS NMIVRSCKCS (SEQ ID NO: 265); where the TGF-β1 polypeptide has a length of about 112 amino acids.

[0456] In some cases, a suitable TGF-β1 polypeptide comprises a C77S substitution. Thus, in some cases, a suitable TGF-β1 polypeptide comprises an amino acid sequence having at least 60%, at least 70%, at least 80%, at least 90%, at least 95%, at least 98%, at least 99%, or 100%, amino acid sequence identity to the following TGF-β1 amino acid sequence: AL DTNYCFSSTE KNCCVRQLYI DFRKDLGWKW IHEPKGYHAN FCLGPCPYIW SLDTQYSKVL ALYNQHNPGA SAAPSCVPQA LEPLPIVYYV GRKPKVEQLS NMIVRSCKCS (SEQ ID NO: 266), where amino acid 77 is Ser.

[0457] A suitable TGF-β2 polypeptide can comprise an amino acid sequence having at least 60%, at least 70%, at least 80%, at least 90%, at least 95%, at least 98%, at least 99%, or 100%, amino acid sequence identity to the following TGF-β2 amino acid sequence: ALDAAYCF RNVQDNCCLR PLYIDFKRDL GWKWIHEPKG YNANFCAGAC PYLWSSDTQH SRVLSLYNTI NPEASASPCC VSQDLEPLTI LYYIGKTPKI EQLSNMIVKS CKCS (SEQ ID NO: 267), where the TGF-β2 polypeptide has a length of about 112 amino acids.

[0458] In some cases, a suitable TGF-β2 polypeptide comprises a C77S substitution. Thus, in some cases, a suitable TGF-β2 polypeptide comprises an amino acid sequence having at least 60%, at least 70%, at least 80%, at least 90%, at least 95%, at least 98%, at least 99%, or 100%, amino acid sequence identity to the following TGF-β2 amino acid sequence: ALDAAYCF RNVQDNCCLR PLYIDFKRDL GWKWIHEPKG YNANFCAGAC PYLWSSDTQH SRVLSLYNTI NPEASASPSC VSQDLEPLTI LYYIGKTPKI EQLSNMIVKS CKCS (SEQ ID NO: 268), where amino acid 77 is Ser.

[0459] A suitable TGF-β3 polypeptide can comprise an amino acid sequence having at least 60%, at least 70%, at least 80%, at least 90%, at least 95%, at least 98%, at least 99%, or 100%, amino acid sequence identity to the following TGF-β3 amino acid sequence: [sequence omitted] (SEQ ID NO: 269), where the TGF-β3 polypeptide has a length of about 112 amino acids.

[0460] In some cases, a suitable TGF-β3 polypeptide comprises a C77S substitution. Thus, in some cases, a suitable TGF-β3 polypeptide comprises an amino acid sequence having at least 60%, at least 70%, at least 80%, at least 90%, at least 95%, at least 98%, at least 99%, or 100%, amino acid sequence identity to the following TGF-β3 amino acid sequence: ALDTNYCFRN LEENCCVRPL YIDFRQDLGW KWVHEPKGYY ANFCSGPCPY LRSADTTHST VLGLYNTLNP EASASPSCVP QDLEPLTILY YVGRTPKVEQ LSNMVVKSCK CS (SEQ ID NO: 270), where amino acid 77 is Ser.

### Dimerizer Pairs

[0461] As noted above, in some cases, an antigen-presenting polypeptide of the present disclosure (including a TMAPP of the present disclosure) comprises a dimerizer pair of polypeptides. For example, where an antigen-presenting polypeptide of the present disclosure (including a TMAPP of the present disclosure) is a multimeric polypeptide comprising at least a first and a second polypeptide, in some cases, the first polypeptide comprises a first member of a dimerization pair, and the second polypeptide comprising a second member of the dimerization pair.

[0462] Dimerization peptides are known in the art; and any known dimerization peptide is suitable for use. Dimerization peptides include polypeptides of the collectin family (e.g., ACRP30 or ACRP30-like proteins) which contain collagen domains consisting of collagen repeats Gly-Xaa-Xaa. Other dimerization peptides include coiled-coil domains and leucine-zipper domains. A collagen domain can comprise (Gly-Xaa-Xaa)ₙ, where Xaa is any amino acid, and where n is an integer from 10 to 40. In some cases, a collagen domain comprises (Gly-Xaa-Pro)ₙ, where Xaa is any amino acid and n is an integer from 10 to 40. Dimerization peptides are well known in the art; see, e.g., U.S. Patent Publication No. 2003/0138440.

[0463] In some cases, a dimerization pair includes two leucine zipper polypeptides that bind to one another. Non-limiting examples of leucine-zipper polypeptides include, e.g., a peptide of any one of the following amino acid sequences: RMKQIEDKIEEILSKIYHIENEIARIKKLIGER (SEQ ID NO: 271); LSSIEKKQEEQTSWLIWISNELTLIRNELAQS (SEQ ID NO: 272); LSSIEKKLEEITSQLIQISNELTLIRNELAQ (SEQ ID NO: 273); LSSIEKKLEEITSQLIQIRNELTLIRNELAQ (SEQ ID NO: 274); LSSIEKKLEEITSQLQQIRNELTLIRNELAQ (SEQ ID NO: 275); LSSLEKKLEELTSQLIQLRNELTLLRNELAQ (SEQ ID NO: 276); ISSLEKKIEELTSQIQQLRNEITLLRNEIAQ (SEQ ID NO: 277).

[0464] In some cases, a leucine zipper polypeptide comprises the following amino acid sequence: LEIEAAFLERENTALETRVAELRQRVQRLRNRVSQYRTRYGPLGGGK (SEQ ID NO: 278).

[0465] Additional leucine-zipper polypeptides are known in the art, any of which is suitable for use in an antigen-presenting polypeptide of the present disclosure.

[0466] A collagen oligomerization peptide can comprise the following amino acid sequence:

(SEQ ID NO: 279)
VTAFSNMDDMLQKAHLVIEGTFIYLRDSTEFFIRVRDGWKKLQLGELIP
IPADSPPPPALSSNP.

[0467] Coiled-coil dimerization peptides are known in the art. For example, a coiled-coil dimerization peptide can be a peptide of any one of the following amino acid sequences:

(SEQ ID NO: 280)
LKSVENRLAVVENQLKTVIEELKTVKDLLSN;
(SEQ ID NO: 281)
LARIEEKLKTIKAQLSEIASTLNMIREQLAQ;
(SEQ ID NO: 282)
VSRLEEKVKTLKSQVTELASTVSLLREQVAQ;
(SEQ ID NO: 283)
IQSEKKIEDISSLIGQIQSEITLIRNEIAQ;
(SEQ ID NO: 284)
LMSLEKKLEELTQTLMQLQNELSMLKNELAQ.

[0468] In some cases, a dimerization peptide comprises at least one cysteine residue. Examples include, e.g.: VDLEGSTSNGRQCAGIRL (SEQ ID NO: 285); EDDVTTTEELAPALVPPPKGTCAGWMA (SEQ ID NO: 286); and GHDQETTTQGPGVLLPLPKGACTGQMA (SEQ ID NO: 287).

### Additional Polypeptides

[0469] A polypeptide chain of a TMAPP of the present disclosure (including a TMAPP of the present disclosure) can include one or more polypeptides in addition to those described above.

[0470] Suitable additional polypeptides include epitope tags and affinity domains. The one or more additional polypeptide can be included at the N-terminus of a polypeptide chain of a TMAPP of the present disclosure, at the C-terminus of a polypeptide chain of a TMAPP of the present disclosure, or internally within a polypeptide chain of a TMAPP of the present disclosure.

### Epitope Tag

[0471] Suitable epitope tags include, but are not limited to, hemagglutinin (HA; e.g., YPYDVPDYA (SEQ ID NO: 288); FLAG (e.g., DYKDDDDK (SEQ ID NO: 289); c-myc (e.g., EQKLISEEDL; SEQ ID NO: 290), and the like.

### Affinity Domain

[0472] Affinity domains include peptide sequences that can interact with a binding partner, e.g., such as one immobilized on a solid support, useful for identification or purification. DNA sequences encoding multiple consecutive single amino acids, such as histidine, when fused to the expressed protein, may be used for one-step purification of the recombinant protein by high affinity binding to a resin column, such as nickel sepharose. Exemplary affinity domains include His5 (HHHHH) (SEQ ID NO: 291), HisX6 (HHHHHH) (SEQ ID NO: 292), C-myc (EQKLISEEDL) (SEQ ID NO: 290), Flag (DYKDDDDK) (SEQ ID NO: 289), StrepTag (WSHPQFEK) (SEQ ID NO: 293), hemagglutinin, e.g., HA Tag (YPYDVPDYA) (SEQ ID NO: 288), glutathione-S-transferase (GST), thioredoxin, cellulose binding domain, RYIRS (SEQ ID NO: 294), Phe-His-His-Thr (SEQ ID NO: 295), chitin binding domain, S-peptide, T7 peptide, SH2 domain, C-end RNA tag, WEAAAREACCRECCARA (SEQ ID NO: 296), metal binding domains, e.g., zinc binding domains or calcium binding domains such as those from calcium-binding proteins, e.g., calmodulin, troponin C, calcineurin B, myosin light chain, recoverin, S-modulin, visinin, VILIP, neurocalcin, hippocalcin, frequenin, caltractin, calpain large-subunit, S100 proteins, parvalbumin, calbindin D9K, calbindin D28K, and calretinin, inteins, biotin, streptavidin, MyoD, Id, leucine zipper sequences, and maltose binding protein.

### Drug Conjugates

[0473] A polypeptide chain of a TMAPP of the present disclosure can comprise a small molecule drug linked (e.g., covalently attached) to the polypeptide chain. For example, where a TMAPP of the present disclosure comprises an Fc polypeptide, the Fc polypeptide can comprise a covalently linked small molecule drug. A polypeptide chain of a TMAPP of the present disclosure can comprise a cytotoxic agent linked (e.g., covalently attached) to the polypeptide chain. For example, where a TMAPP of the present disclosure comprises an Fc polypeptide, the Fc polypeptide can comprise a covalently linked cytotoxic agent. Cytotoxic agents include prodrugs.

[0474] A drug can be linked directly or indirectly to a polypeptide chain of a TMAPP of the present disclosure. For example, where a TMAPP of the present disclosure comprises an Fc polypeptide, a drug can be linked directly or indirectly to the Fc polypeptide. Direct linkage can involve linkage directly to an amino acid side chain. Indirect linkage can be linkage via a linker. A drug can be linked to a polypeptide chain (e.g., an Fc polypeptide) of a TMAPP of the present disclosure via a thioether bond, an amide bond, a carbamate bond, a disulfide bond, or an ether bond.

[0475] Linkers include cleavable linkers and non-cleavable linkers. In some cases, the linker is a protease-cleavable linker. Suitable linkers include, e.g., peptides (e.g., from 2 to 10 amino acids in length; e.g., 2, 3, 4, 5, 6, 7, 8, 9, or 10 amino acids in length), alkyl chains, poly(ethylene glycol), disulfide groups, thioether groups, acid labile groups, photolabile groups, peptidase labile groups, and esterase labile groups. Non-limiting example of suitable linkers are: i) N-succinimidyl-[(N-maleimidopropionamido)-tetraethyleneglycol]ester (NHS-PEG4-maleimide); ii) N-succinimidyl 4-(2-pyridyldithio)butanoate (SPDB); N-succinimidyl 4-(2-pyridyldithio)2-sulfobutanoate (sulfo-SPDB); N-succinimidyl 4-(2-pyridyldithio) pentanoate (SPP); N-succinimidyl-4-(N-maleimidomethyl)-cyclohexane-1-carboxy-(6-amidocaproate) (LC-SMCC); κ-maleimidoundecanoic acid N-succinimidyl ester (KMUA); γ-maleimide butyric acid N-succinimidyl ester (GMBS); ε-maleimidocaproic acid N-hydroxysuccinimide ester (EMCS); m-maleimide benzoyl-N-hydroxysuccinimide ester (MBS); N-(α-maleimidoacetoxy)-succinimide ester (AMAS); succinimidyl-6-(β-maleimidopropionamide)hexanoate (SMPH); N-succinimidyl 4-(p-maleimidophenyl)butyrate (SMPB); N-(p-maleimidophenyl)isocyanate (PMPI); N-succinimidyl 4(2-pyridylthio)pentanoate (SPP); N-succinimidyl(4-iodo-acetyl)aminobenzoate (SIAB); 6-maleimidocaproyl (MC); maleimidopropanoyl (MP); p-aminobenzyloxycarbonyl (PAB); N-succinimidyl 4-(maleimidomethyl)cyclohexanecarboxylate (SMCC); N-succinimidyl-4-(N-maleimidomethyl)-cyclohexane-1-carboxy-(6-amidocaproate), a “long chain” analog of SMCC (LC-SMCC); 3-maleimidopropanoic acid N-succinimidyl ester (BMPS); N-succinimidyl iodoacetate (SIA); N-succinimidyl bromoacetate (SBA); and N-succinimidyl 3-(bromoacetamido)propionate (SBAP).

[0476] A polypeptide (e.g., an Fc polypeptide) can be modified with crosslinking reagents such as succinimidyl 4-(N-maleimidomethyl)-cyclohexane-1-carboxylate (SMCC), sulfo-SMCC, maleimidobenzoyl-N-hydroxysuccinimide ester (MBS), sulfo-MBS or succinimidyl-iodoacetate, as described in the literature, to introduce 1-10 reactive groups. The modified Fc polypeptide is then reacted with a thiol-containing cytotoxic agent to produce a conjugate.

[0477] For example, where a TMAPP of the present disclosure comprises an Fc polypeptide, the polypeptide chain comprising the Fc polypeptide can be of the formula (A)-(L)-(C), where (A) is the polypeptide chain comprising the Fc polypeptide; where (L), if present, is a linker; and where (C) is a cytotoxic agent. (L), if present, links (A) to (C). In some cases, the polypeptide chain comprising the Fc polypeptide can comprise more than one cytotoxic agent (e.g., 2, 3, 4, or 5, or more than 5, cytotoxic agents).

[0478] Suitable drugs include, e.g., rapamycin. Suitable drugs include, e.g., retinoids, such as all-trans retinoic acid (ATRA); vitamin D3; a vitamin D3 analog; and the like. As noted above, in some cases, a drug is a cytotoxic agent. Cytotoxic agents are known in the art. A suitable cytotoxic agent can be any compound that results in the death of a cell, or induces cell death, or in some manner decreases cell viability, and includes, for example, maytansinoids and maytansinoid analogs, benzodiazepines, taxoids, CC-1065 and CC-1065 analogs, duocarmycins and duocarmycin analogs, enediynes, such as calicheamicins, dolastatin and dolastatin analogs including auristatins, tomaymycin derivatives, leptomycin derivatives, methotrexate, cisplatin, carboplatin, daunorubicin, doxorubicin, vincristine, vinblastine, melphalan, mitomycin C, chlorambucil and morpholino doxorubicin.

[0479] For example, in some cases, the cytotoxic agent is a compound that inhibits microtubule formation in eukaryotic cells. Such agents include, e.g., maytansinoid, benzodiazepine, taxoid, CC-1065, duocarmycin, a duocarmycin analog, calicheamicin, dolastatin, a dolastatin analog, auristatin, tomaymycin, and leptomycin, or a pro-drug of any one of the foregoing. Maytansinoid compounds include, e.g., N(2′)-deacetyl-N(2′)-(3-mercapto-1-oxopropyl)-maytansine (DM1); N(2′)-deacetyl-N(2′)-(4-mercapto-1-oxopentyl)-maytansine (DM3); and N(2′)-deacetyl-N2-(4-mercapto-4-methyl-1-oxopentyl)-maytansine (DM4). Benzodiazepines include, e.g., indolinobenzodiazepines and oxazolidinobenzodiazepines.

[0480] Cytotoxic agents are known in the art. A suitable cytotoxic agent can be any compound that results in the death of a cell, or induces cell death, or in some manner decreases cell viability, and includes, for example, maytansinoids and maytansinoid analogs, benzodiazepines, taxoids, CC-1065 and CC-1065 analogs, duocarmycins and duocarmycin analogs, enediynes, such as calicheamicins, dolastatin and dolastatin analogs including auristatins, tomaymycin derivatives, leptomycin derivatives, methotrexate, cisplatin, carboplatin, daunorubicin, doxorubicin, vincristine, vinblastine, melphalan, mitomycin C, chlorambucil and morpholino doxorubicin.

[0481] Cytotoxic agents include taxol; cytochalasin B; gramicidin D; ethidium bromide; emetine; mitomycin; etoposide; tenoposide; vincristine; vinblastine; colchicin; doxorubicin; daunorubicin; dihydroxy anthracin dione; maytansine or an analog or derivative thereof; an auristatin or a functional peptide analog or derivative thereof; dolastatin 10 or 15 or an analogue thereof; irinotecan or an analogue thereof; mitoxantrone; mithramycin; actinomycin D; 1-dehydrotestosterone; a glucocorticoid; procaine; tetracaine; lidocaine; propranolol; puromycin; calicheamicin or an analog or derivative thereof; an antimetabolite; 6 mercaptopurine; 6 thioguanine; cytarabine; fludarabin; 5 fluorouracil; decarbazine; hydroxyurea; asparaginase; gemcitabine; cladribine; an alkylating agent; a platinum derivative; duocarmycin A; duocarmycin SA; rachelmycin (CC-1065) or an analog or derivative thereof; an antibiotic; pyrrolo[2,1-c][1,4]-benzodiazepines (PDB); diphtheria toxin; ricin toxin; cholera toxin; a Shiga-like toxin; LT toxin; C3 toxin; Shiga toxin; pertussis toxin; tetanus toxin; soybean Bowman-Birk protease inhibitor; Pseudomonas exotoxin; alorin; saporin; modeccin; gelanin; abrin A chain; modeccin A chain; alpha-sarcin; Aleurites fordii proteins; dianthin proteins; Phytolacca americana proteins; Momordica charantia inhibitor; curcin; crotin; Sapaonaria officinalis inhibitor; gelonin; mitogellin; restrictocin; phenomycin; enomycin toxins; ribonuclease (RNase); DNase I; Staphylococcal enterotoxin A; pokeweed antiviral protein; diphtherin toxin; and Pseudomonas endotoxin.

[0482] In some cases, the cytotoxic agent is a compound that inhibits microtubule formation in eukaryotic cells. Such agents include, e.g., maytansinoid, benzodiazepine, taxoid, CC-1065, duocarmycin, a duocarmycin analog, calicheamicin, dolastatin, a dolastatin analog, auristatin, tomaymycin, and leptomycin, or a pro-drug of any one of the foregoing. Maytansinoid compounds include, e.g., N(2′)-deacetyl-N(2′)-(3-mercapto-1-oxopropyl)-maytansine (DM1); N(2′)-deacetyl-N(2′)-(4-mercapto-1-oxopentyl)-maytansine (DM3); and N(2′)-deacetyl-N2-(4-mercapto-4-methyl-1-oxopentyl)-maytansine (DM4). Benzodiazepines include, e.g., indolinobenzodiazepines and oxazolidinobenzodiazepines.

### Exemplary T-Cell Modulatory Antigen-Presenting Polypeptides

[0483] The following are non-limiting examples of multimeric TMAPPs of the present disclosure employing the following pairs of polypeptides: 1) the 3003 polypeptide depicted in FIG. 40C and the 2639 polypeptide depicted in FIG. 40B; 2) the 3004 polypeptide depicted in FIG. 40D and the 2639 polypeptide depicted in FIG. 40B; 3) the 3005 polypeptide depicted in FIG. 40E and the 2639 polypeptide depicted in FIG. 40B; 4) the 2932 polypeptide depicted in FIG. 40A and the 3213 polypeptide depicted in FIG. 40F; and 5) the 2932 polypeptide depicted in FIG. 40A and the 3214 polypeptide depicted in FIG. 40G.

[0484] 1) 3003+2639. In some cases, a multimeric TMAPP of the present disclosure comprises: a) a first polypeptide comprising, in order from N-terminus to C-terminus: i) an immunomodulatory polypeptide; ii) a linker; iii) an HLA α1 polypeptide; iv) an HLA α2 polypeptide; and v) an Ig Fc polypeptide; and b) a second polypeptide comprising, in order from N-terminus to C-terminus: i) a peptide that presents an epitope capable of binding to a TCR); ii) a linker; iii) an HLA β1 polypeptide; and iv) an HLA β2 polypeptide. In some cases, the immunomodulatory polypeptide is a PD-L1 polypeptide. In some cases, the PD-L1 polypeptide comprises the following amino acid sequence: FTVTVPKDLYVVEYGSNMTIECKFPVEKQLDLAALIVYWEMEDKNIIQFVHGEEDLKVQ HSSYRQRARLLKDQLSLGNAALQITDVKLQDAGVYRCMISYGGADYKRITVKVNAPYN KINQRILVVDPVTSEHELTCQAEGYPKAEVIWTSSDHQVLSGKTTTTNSKREEKLFNVTS TLRINTTTNEIFYCTFRRLDPEENHTAELVIPELPLAHPPNER (SEQ ID NO: 297) and has a length of 220 amino acids. In some cases, the HLA α1 and HLA α2 polypeptides together comprise the following amino acid sequence: IKEEHVIIQAEFYLNPDQSGEFMFDFDGDEIFHVDMAKKETVWRLEEFGRFASFEAQGAL ANIAVDKANLEIMTKRSNYTPITNVPPEVTVLTNSPVELREPNVLICFIDKFTPPVVNVTW LRNGKPVTTGVSETVFLPREDHLFRKFHYLPFLPSTEDVYDCRVEHWGLDEPLLKHWEF DAPSPLPET (SEQ ID NO: 298) and have a length of 189 amino acids. In some cases, the Ig Fc polypeptide is an IgG1 Fc polypeptide with L14A and L15A substitutions, e.g., where the Ig Fc polypeptide comprises the following amino acid sequence: DKTHTCPPCPAPEAAGGPSVFLFPPKPKDTLMISRTPEVTCVVVDVSHEDPEVKFNWYV DGVEVHNAKTKPREEQYNSTYRVVSVLTVLHQDWLNGKEYKCKVSNKALPAPIEKTIS KAKGQPREPQVYTLPPSREEMTKNQVSLTCLVKGFYPSDIAVEWESNGQPENNYKTTPP VLDSDGSFFLYSKLTVDKSRWQQGNVFSCSVMHEALHNHYTQKSLSLSPG (SEQ ID NO: 299) and has a length of 226 amino acids. In some cases, the peptide epitope is a self peptide. For example, in some cases, the peptide epitope is: SLQPLALEGSLQSRG (SEQ ID NO: 78). In some cases, the HLA β1 and β2 polypeptides together comprise the following amino acid sequence: GDTRPRFLEQVKHECHFFNGTERVRFLDRYFYHQEEYVRFDSDVGEYRAVTELGRPDA EYWNSQKDLLEQKRAAVDTYCRHNYGVGESFTVQRRVYPEVTVYPAKTQPLQHHNLL VCSVNGFYPASIEVRWFRNGQEEKTGVVSTGLIQNGDWTFQTLVMLETVPRSGEVYTC QVEHPSLTSPLTVEWRARSESAQSKM (SEQ ID NO: 300), and have a length of 199 amino acids. A suitable linker can be GGGGSGGGGSGGGGS (SEQ ID NO: 301) or GGGGSGGGGSGGGGSGGGGS (SEQ ID NO: 302).

[0485] 2) 3004+2639. In some cases, a multimeric TMAPP of the present disclosure comprises: a) a first polypeptide comprising, in order from N-terminus to C-terminus: i) an HLA α1 polypeptide; ii) an HLA α2 polypeptide; iii) a linker; iv) an immunomodulatory polypeptide; v) a linker; and vi) an Ig Fc polypeptide; and b) a second polypeptide comprising, in order from N-terminus to C-terminus: i) a peptide that presents an epitope capable of binding to a TCR); ii) a linker; iii) an HLA β1 polypeptide; and iv) an HLA β2 polypeptide. In some cases, the immunomodulatory polypeptide is a PD-L1 polypeptide. In some cases, the PD-L1 polypeptide comprises the following amino acid sequence: FTVTVPKDLYVVEYGSNMTIECKFPVEKQLDLAALIVYWEMEDKNIIQFVHGEEDLKVQ HSSYRQRARLLKDQLSLGNAALQITDVKLQDAGVYRCMISYGGADYKRITVKVNAPYN KINQRILVVDPVTSEHELTCQAEGYPKAEVIWTSSDHQVLSGKTTTTNSKREEKLFNVTS TLRINTTTNEIFYCTFRRLDPEENHTAELVIPELPLAHPPNER (SEQ ID NO: 297) and has a length of 220 amino acids. In some cases, the HLA α1 and HLA α2 polypeptides together comprise the following amino acid sequence: IKEEHVIIQAEFYLNPDQSGEFMFDFDGDEIFHVDMAKKETVWRLEEFGRFASFEAQGAL ANIAVDKANLEIMTKRSNYTPITNVPPEVTVLTNSPVELREPNVLICFIDKFTPPVVNVTW LRNGKPVTTGVSETVFLPREDHLFRKFHYLPFLPSTEDVYDCRVEHWGLDEPLLKHWEF DAPSPLPET (SEQ ID NO: 298) and have a length of 189 amino acids. In some cases, the Ig Fc polypeptide is an IgG1 Fc polypeptide with L14A and L15A substitutions, e.g., where the Ig Fc polypeptide comprises the following amino acid sequence: DKTHTCPPCPAPEAAGGPSVFLFPPKPKDTLMISRTPEVTCVVVDVSHEDPEVKFNWYV DGVEVHNAKTKPREEQYNSTYRVVSVLTVLHQDWLNGKEYKCKVSNKALPAPIEKTIS KAKGQPREPQVYTLPPSREEMTKNQVSLTCLVKGFYPSDIAVEWESNGQPENNYKTTPP VLDSDGSFFLYSKLTVDKSRWQQGNVFSCSVMHEALHNHYTQKSLSLSPG (SEQ ID NO: 299) and has a length of 226 amino acids. In some cases, the peptide epitope is a self peptide. For example, in some cases, the peptide epitope is: SLQPLALEGSLQSRG (SEQ ID NO: 78). In some cases, the HLA β1 and β2 polypeptides together comprise the following amino acid sequence: GDTRPRFLEQVKHECHFFNGTERVRFLDRYFYHQEEYVRFDSDVGEYRAVTELGRPDA EYWNSQKDLLEQKRAAVDTYCRHNYGVGESFTVQRRVYPEVTVYPAKTQPLQHHNLL VCSVNGFYPASIEVRWFRNGQEEKTGVVSTGLIQNGDWTFQTLVMLETVPRSGEVYTC QVEHPSLTSPLTVEWRARSESAQSKM (SEQ ID NO: 300), and have a length of 199 amino acids. A suitable linker can be GGGGSGGGGSGGGGS (SEQ ID NO: 301) or GGGGSGGGGSGGGGSGGGGS (SEQ ID NO: 302).

[0486] 3) 3005+2639. In some cases, a multimeric TMAPP of the present disclosure comprises: a) a first polypeptide comprising, in order from N-terminus to C-terminus: i) an HLA α1 polypeptide; ii) an HLA α2 polypeptide; iii) a linker; iv) an Ig Fc polypeptide; and v) an immunomodulatory polypeptide; and b) a second polypeptide comprising, in order from N-terminus to C-terminus: i) a peptide that presents an epitope capable of binding to a TCR); ii) a linker; iii) an HLA β1 polypeptide; and iv) an HLA β2 polypeptide. In some cases, the immunomodulatory polypeptide is a PD-L1 polypeptide. In some cases, the PD-L1 polypeptide comprises the following amino acid sequence: FTVTVPKDLYVVEYGSNMTIECKFPVEKQLDLAALIVYWEMEDKNIIQFVHGEEDLKVQ HSSYRQRARLLKDQLSLGNAALQITDVKLQDAGVYRCMISYGGADYKRITVKVNAPYN KINQRILVVDPVTSEHELTCQAEGYPKAEVIWTSSDHQVLSGKTTTTNSKREEKLFNVTS TLRINTTTNEIFYCTFRRLDPEENHTAELVIPELPLAHPPNER (SEQ ID NO: 297) and has a length of 220 amino acids. In some cases, the HLA α1 and HLA α2 polypeptides together comprise the following amino acid sequence: IKEEHVIIQAEFYLNPDQSGEFMFDFDGDEIFHVDMAKKETVWRLEEFGRFASFEAQGAL ANIAVDKANLEIMTKRSNYTPITNVPPEVTVLTNSPVELREPNVLICFIDKFTPPVVNVTW LRNGKPVTTGVSETVFLPREDHLFRKFHYLPFLPSTEDVYDCRVEHWGLDEPLLKHWEF DAPSPLPET (SEQ ID NO: 298) and have a length of 189 amino acids. In some cases, the Ig Fc polypeptide is an IgG1 Fc polypeptide with L14A and L15A substitutions, e.g., where the Ig Fc polypeptide comprises the following amino acid sequence: DKTHTCPPCPAPEAAGGPSVFLFPPKPKDTLMISRTPEVTCVVVDVSHEDPEVKFNWYV DGVEVHNAKTKPREEQYNSTYRVVSVLTVLHQDWLNGKEYKCKVSNKALPAPIEKTIS KAKGQPREPQVYTLPPSREEMTKNQVSLTCLVKGFYPSDIAVEWESNGQPENNYKTTPP VLDSDGSFFLYSKLTVDKSRWQQGNVFSCSVMHEALHNHYTQKSLSLSPG (SEQ ID NO: 299) and has a length of 226 amino acids. In some cases, the peptide epitope is a self peptide. For example, in some cases, the peptide epitope is: SLQPLALEGSLQSRG (SEQ ID NO: 78). In some cases, the HLA β1 and β2 polypeptides together comprise the following amino acid sequence: GDTRPRFLEQVKHECHFFNGTERVRFLDRYFYHQEEYVRFDSDVGEYRAVTELGRPDA EYWNSQKDLLEQKRAAVDTYCRHNYGVGESFTVQRRVYPEVTVYPAKTQPLQHHNLL VCSVNGFYPASIEVRWFRNGQEEKTGVVSTGLIQNGDWTFQTLVMLETVPRSGEVYTC QVEHPSLTSPLTVEWRARSESAQSKM (SEQ ID NO: 300), and have a length of 199 amino acids. A suitable linker can be GGGGSGGGGSGGGGS (SEQ ID NO: 301) or GGGGSGGGGSGGGGSGGGGS (SEQ ID NO: 302).

[0487] 4) 2932+3213. In some cases, a multimeric TMAPP of the present disclosure comprises: a) a first polypeptide comprising, in order from N-terminus to C-terminus: i) an HLA α1 polypeptide; ii) an HLA α2 polypeptide; iii) a linker; and iv) an Ig Fc polypeptide; and b) a second polypeptide comprising, in order from N-terminus to C-terminus: i) an immunomodulatory polypeptide; ii) a linker; iii) a peptide that presents an epitope capable of binding to a TCR); iv) a linker; v) an HLA R1 polypeptide; and vi) an HLA β2 polypeptide. In some cases, the immunomodulatory polypeptide is a PD-L1 polypeptide. In some cases, the PD-L1 polypeptide comprises the following amino acid sequence: FTVTVPKDLYVVEYGSNMTIECKFPVEKQLDLAALIVYWEMEDKNIIQFVHGEEDLKVQ HSSYRQRARLLKDQLSLGNAALQITDVKLQDAGVYRCMISYGGADYKRITVKVNAPYN KINQRILVVDPVTSEHELTCQAEGYPKAEVIWTSSDHQVLSGKTTTTNSKREEKLFNVTS TLRINTTTNEIFYCTFRRLDPEENHTAELVIPELPLAHPPNER (SEQ ID NO: 297) and has a length of 220 amino acids. In some cases, the HLA α1 and HLA α2 polypeptides together comprise the following amino acid sequence: IKEEHVIIQAEFYLNPDQSGEFMFDFDGDEIFHVDMAKKETVWRLEEFGRFASFEAQGAL ANIAVDKANLEIMTKRSNYTPITNVPPEVTVLTNSPVELREPNVLICFIDKFTPPVVNVTW LRNGKPVTTGVSETVFLPREDHLFRKFHYLPFLPSTEDVYDCRVEHWGLDEPLLKHWEF DAPSPLPET (SEQ ID NO: 298) and have a length of 189 amino acids. In some cases, the Ig Fc polypeptide is an IgG1 Fc polypeptide with L14A and L15A substitutions, e.g., where the Ig Fc polypeptide comprises the following amino acid sequence: DKTHTCPPCPAPEAAGGPSVFLFPPKPKDTLMISRTPEVTCVVVDVSHEDPEVKFNWYV DGVEVHNAKTKPREEQYNSTYRVVSVLTVLHQDWLNGKEYKCKVSNKALPAPIEKTIS KAKGQPREPQVYTLPPSREEMTKNQVSLTCLVKGFYPSDIAVEWESNGQPENNYKTTPP VLDSDGSFFLYSKLTVDKSRWQQGNVFSCSVMHEALHNHYTQKSLSLSPG (SEQ ID NO: 299) and has a length of 226 amino acids. In some cases, the peptide epitope is a self peptide. For example, in some cases, the peptide epitope is: SLQPLALEGSLQSRG (SEQ ID NO: 78). In some cases, the HLA β1 and β2 polypeptides together comprise the following amino acid sequence: GDTRPRFLEQVKHECHFFNGTERVRFLDRYFYHQEEYVRFDSDVGEYRAVTELGRPDA EYWNSQKDLLEQKRAAVDTYCRHNYGVGESFTVQRRVYPEVTVYPAKTQPLQHHNLL VCSVNGFYPASIEVRWFRNGQEEKTGVVSTGLIQNGDWTFQTLVMLETVPRSGEVYTC QVEHPSLTSPLTVEWRARSESAQSKM (SEQ ID NO: 300), and have a length of 199 amino acids. A suitable linker can be GGGGSGGGGSGGGGS (SEQ ID NO: 301) or GGGGSGGGGSGGGGSGGGGS (SEQ ID NO: 302).

[0488] 5) 2932+3214. In some cases, a multimeric TMAPP of the present disclosure comprises: a) a first polypeptide comprising, in order from N-terminus to C-terminus: i) an HLA α1 polypeptide; ii) an HLA α2 polypeptide; iii) a linker; and iv) an Ig Fc polypeptide; and b) a second polypeptide comprising, in order from N-terminus to C-terminus: i) a peptide that presents an epitope capable of binding to a TCR); ii) a linker; iii) an HLA β1 polypeptide; iv) an HLA β2 polypeptide; and v) an immunomodulatory polypeptide. In some cases, the immunomodulatory polypeptide is a PD-L1 polypeptide. In some cases, the PD-L1 polypeptide comprises the following amino acid sequence: FTVTVPKDLYVVEYGSNMTIECKFPVEKQLDLAALIVYWEMEDKNIIQFVHGEEDLKVQ HSSYRQRARLLKDQLSLGNAALQITDVKLQDAGVYRCMISYGGADYKRITVKVNAPYN KINQRILVVDPVTSEHELTCQAEGYPKAEVIWTSSDHQVLSGKTTTTNSKREEKLFNVTS TLRINTTTNEIFYCTFRRLDPEENHTAELVIPELPLAHPPNER (SEQ ID NO: 297) and has a length of 220 amino acids. In some cases, the HLA α1 and HLA α2 polypeptides together comprise the following amino acid sequence: IKEEHVIIQAEFYLNPDQSGEFMFDFDGDEIFHVDMAKKETVWRLEEFGRFASFEAQGAL ANIAVDKANLEIMTKRSNYTPITNVPPEVTVLTNSPVELREPNVLICFIDKFTPPVVNVTW LRNGKPVTTGVSETVFLPREDHLFRKFHYLPFLPSTEDVYDCRVEHWGLDEPLLKHWEF DAPSPLPET (SEQ ID NO: 298) and have a length of 189 amino acids. In some cases, the Ig Fc polypeptide is an IgG1 Fc polypeptide with L14A and L15A substitutions, e.g., where the Ig Fc polypeptide comprises the following amino acid sequence: DKTHTCPPCPAPEAAGGPSVFLFPPKPKDTLMISRTPEVTCVVVDVSHEDPEVKFNWYV DGVEVHNAKTKPREEQYNSTYRVVSVLTVLHQDWLNGKEYKCKVSNKALPAPIEKTIS KAKGQPREPQVYTLPPSREEMTKNQVSLTCLVKGFYPSDIAVEWESNGQPENNYKTTPP VLDSDGSFFLYSKLTVDKSRWQQGNVFSCSVMHEALHNHYTQKSLSLSPG (SEQ ID NO: 299) and has a length of 226 amino acids. In some cases, the peptide epitope is a self peptide. For example, in some cases, the peptide epitope is: SLQPLALEGSLQSRG (SEQ ID NO: 78). In some cases, the HLA β1 and β2 polypeptides together comprise the following amino acid sequence: GDTRPRFLEQVKHECHFFNGTERVRFLDRYFYHQEEYVRFDSDVGEYRAVTELGRPDA EYWNSQKDLLEQKRAAVDTYCRHNYGVGESFTVQRRVYPEVTVYPAKTQPLQHHNLL VCSVNGFYPASIEVRWFRNGQEEKTGVVSTGLIQNGDWTFQTLVMLETVPRSGEVYTC QVEHPSLTSPLTVEWRARSESAQSKM (SEQ ID NO: 300), and have a length of 199 amino acids. A suitable linker can be GGGGSGGGGSGGGGS (SEQ ID NO: 301) or GGGGSGGGGSGGGGSGGGGS (SEQ ID NO: 302).

### Additional Exemplary Multimeric TMAPPs

[0489] The following are non-limiting examples of multimeric TMAPPs of the present disclosure employing the following pairs of polypeptides: 1) the 1452 polypeptide depicted in FIG. 26A and the 1661 polypeptide depicted in FIG. 34A; 2) the 1659 polypeptide depicted in FIG. 33A and the 1664 polypeptide depicted in FIG. 35A; 3) the 1637 polypeptide depicted in FIG. and the 1408 polypeptide depicted in FIG. 25A; the 1639 polypeptide depicted in FIG. 31A and the 1640 polypeptide depicted in FIG. 32A; and 5) the 1711 polypeptide depicted in FIG. 37A and the 1705 polypeptide depicted in FIG. 38A. A TMAPP to be administered to an individual in need thereof will generally not include a leader sequence or a histidine tag as depicted in the aforementioned figures.

[0490] 1) 1452+1661. In some cases, a multimeric TMAPP of the present disclosure comprises: a) a first polypeptide comprising, in order from N-terminus to C-terminus: i) an epitope; ii) a linker; iii) an HLA β1 polypeptide; iv) an HLA α1 polypeptide; v) an HLA α2 polypeptide; vi) a dimerizer polypeptide; and vii) an Ig Fc polypeptide; and b) a second polypeptide comprising, in order from N-terminus to C-terminus: i) a first immunomodulatory polypeptide (e.g., a variant immunomodulatory polypeptide with reduced affinity for its cognate co-immunomodulatory polypeptide); ii) a second immunomodulatory polypeptide (e.g., a variant immunomodulatory polypeptide with reduced affinity for its cognate co-immunomodulatory polypeptide); iii) an HLA β2 polypeptide; and iv) a dimerizer polypeptide. As one non-limiting example, a multimeric TMAPP of the present disclosure can comprise: a) a first polypeptide comprising, in order from N-terminus to C-terminus: i) an epitope; ii) a linker; iii) an HLA DRB1 β1 polypeptide; iv) an HLA DRA α1 polypeptide; v) an HLA DRA α2 polypeptide; vi) a leucine zipper dimerizer polypeptide; and vii) an IgG1 Fc polypeptide; and b) a second polypeptide comprising, in order from N-terminus to C-terminus: i) a first immunomodulatory polypeptide (e.g., a variant IL-2 polypeptide comprising H16A and F42A substitutions); ii) a second immunomodulatory polypeptide (e.g., a variant IL-2 polypeptide comprising H16A and F42A substitutions); iii) an HLA DRB β2 polypeptide; and iv) a leucine zipper dimerizer polypeptide. In some cases, the epitope is a hemagglutinin epitope, e.g., PKYVKQNTLKLAT (SEQ ID NO: 303). In some cases, the variant IL-2 polypeptide comprises the following amino acid sequence: APTSSSTKKTQLQLEALLLDLQMILNGINNYKNPKLTRMLTAKFYMPKKATELKHLQCL EEELKPLEEVLNLAQSKNFHLRPRDLISNINVIVLELKGSETTFMCEYADETATIVEFLNR WITFCQSIISTLT (SEQ ID NO: 304), where the H16A and F42A substitutions are underlined. In some cases, the HLA-DRB1 β1 polypeptide comprises the following amino acid sequence: DTRPRFLWQHKFECHFFNGTERVRLLERCIYNQEESVRFDSDVGEYRAVTELGRPDAEY WNSQKDLLEQRRAAVDTYCRHNYGVGESFTVQR (SEQ ID NO: 305). In some cases, the HLA DRA α1 polypeptide comprises the following amino acid sequence IKEEHVIIQAEFYLNPDQSGEFMFDFDGDEIFHVDMAKKETVWRLEEFGRFASFEAQGAL ANIAVDKANLEIMTKRSNYTPITN (SEQ ID NO: 306). In some cases, the HLA DRA α2 polypeptide comprises the following amino acid sequence VPPEVTVLTNSPVELREPNVLICFIDKFTPPVVNVTWLRNGKPVTTGVSETVFLPREDHL FRKFHYLPFLPSTEDVYDCRVEHWGLDEPLLKHWEFDAPSPLPET (SEQ ID NO: 307). In some cases, the leucine zipper dimerizer polypeptide comprises the following amino acid sequence: LEIRAAFLRQRNTALRTEVAELEQEVQRLENEVSQYETRYGPLGGGK (SEQ ID NO: 308). In some cases, the IgG1 Fc polypeptide comprises the following amino acid sequence: DKTHTCPPCPAPELLGGPSVFLFPPKPKDTLMISRTPEVTCVVVDVSHEDPEVKFNWYV DGVEVHNAKTKPREEQYASTYRVVSVLTVLHQDWLNGKEYKCKVSNKALPAPIEKTIS KAKGQPREPQVYTLPPSREEMTKNQVSLTCLVKGFYPSDIAVEWESNGQPENNYKTTPP VLDSDGSFFLYSKLTVDKSRWQQGNVFSCSVMHEALHNHYTQKSLSLSPGK (SEQ ID NO: 309). In some cases, the first polypeptide comprises the 1452 amino acid sequence depicted in FIG. 26A, without the leader sequence and without the C-terminal linker and histidine tag. For example, in some cases, the first polypeptide comprises amino acids 21 to 628 of the 1452 amino acid sequence depicted in FIG. 26A. In some cases, the second polypeptide comprises the 1661 amino acid sequence depicted in FIG. 34A, without the leader sequence. For example, in some cases, the second polypeptide comprises amino acids 21 to 491 of the amino acid sequence depicted in FIG. 34A. In some cases, the epitope of the first polypeptide is not PKYVKQNTLKLAT (SEQ ID NO: 303), but instead is substituted with a different epitope.

[0491] 2) 1659+1664. In some cases, a multimeric TMAPP of the present disclosure comprises: a) a first polypeptide comprising, in order from N-terminus to C-terminus: i) an epitope; ii) an HLA β1 polypeptide; iii) an HLA α1 polypeptide; iv) an HLA α2 polypeptide; and v) an Ig Fc polypeptide; and b) a second polypeptide comprising, in order from N-terminus to C-terminus: i) a first immunomodulatory polypeptide (e.g., a variant immunomodulatory polypeptide with reduced affinity for its cognate co-immunomodulatory polypeptide); ii) a second immunomodulatory polypeptide (e.g., a variant immunomodulatory polypeptide with reduced affinity for its cognate co-immunomodulatory polypeptide); and iii) an HLA β2 polypeptide. As one non-limiting example, a multimeric TMAPP of the present disclosure can comprise: a) a first polypeptide comprising, in order from N-terminus to C-terminus: i) an epitope; ii) an HLA DRB1 β1 polypeptide; iii) an HLA DRA α1 polypeptide; iv) an HLA DRA α2 polypeptide; and v) an IgG1 Fc polypeptide; and b) a second polypeptide comprising, in order from N-terminus to C-terminus: i) a first immunomodulatory polypeptide (e.g., a variant IL-2 polypeptide comprising H16A and F42A substitutions); ii) a second immunomodulatory polypeptide (e.g., a variant IL-2 polypeptide comprising H16A and F42A substitutions); and iii) an HLA DRB1 β2 polypeptide. In some cases, the epitope is a hemagglutinin epitope, e.g., PKYVKQNTLKLAT (SEQ ID NO: 303). In some cases, the HLA DRB1 β1 polypeptide comprises the following amino acid sequence: DTRPRFLWQHKFECHFFNGTERVRLLERCIYNQEESVRFDSDVGEYRAVTELGRPDAEY WNSQKDLLEQRRAAVDTYCRHNYGVGESFTVQR (SEQ ID NO: 305). In some cases, the DRA α1 polypeptide comprises the following amino acid sequence: IKEEHVIIQAEFYLNPDQSGEFMFDFDGDEIFHVDMAKKETVWRLEEFGRFASFEAQGAL ANIAVDKANLEIMTKRSNYTPITN (SEQ ID NO: 306). In some cases, the DRA α2 polypeptide comprises the following amino acid sequence: VPPEVTVLTNSPVELREPNVLICFIDKFTPPVVNVTWLRNGKPVTTGVSETVFLPREDHL FRKFHYLPFLPSTEDVYDCRVEHWGLDEPLLKHWEFDA (SEQ ID NO: 320). In some cases, the IgG1 Fc polypeptide comprises the following amino acid sequence: DKTHTCPPCPAPELLGGPSVFLFPPKPKDTLMISRTPEVTCVVVDVSHEDPEVKFNWYV DGVEVHNAKTKPREEQYASTYRVVSVLTVLHQDWLNGKEYKCKVSNKALPAPIEKTIS KAKGQPREPQVYTLPPSREEMTKNQVSLTCLVKGFYPSDIAVEWESNGQPENNYKTTPP VLDSDGSFFLYSKLTVDKSRWQQGNVFSCSVMHEALHNHYTQKSLSLSPGK (SEQ ID NO: 309). In some cases, the variant IL-2 polypeptide comprises the following amino acid sequence: APTSSSTKKTQLQLEALLLDLQMILNGINNYKNPKLTRMLTKFYMPKKATELKHLQCL EEELKPLEEVLNLAQSKNFHLRPRDLISNINVIVLELKGSETTFMCEYADETATIVEFLNR WITFCQSIISTLT (SEQ ID NO: 304), where the H16A and F42A substitutions are underlined. In some cases, the HLA DRB1 β2 polypeptide comprises the following amino acid sequence: PKVTVYPSKTQPLQHHNLLVCSVSGFYPGSIEVRWFRNGQEEKAGVVSTGLIQNGDWTF QTLVMLETVPRSGEVYTCQVEHPSVTSPLTVEWRARSESAQSKM (SEQ ID NO: 310). In some cases, the first polypeptide comprises the 1659 amino acid sequence depicted in FIG. 33A, without the leader peptide and without the C-terminal linker and histidine tag. For example, in some cases, the first polypeptide comprises amino acids 21 to 591 of the 1659 amino acid sequence depicted in FIG. 33A. In some cases, the epitope is not PKYVKQNTLKLAT (SEQ ID NO: 303), but instead is substituted with a different epitope. In some cases, the second polypeptide comprises the 1664 amino acid sequence depicted in FIG. 35A, without the leader sequence. For example, in some cases, the second polypeptide comprises amino acids 21 to 429 of the 1664 amino acid sequence depicted in FIG. 35A.

[0492] 3) 1637-1408. In some cases, a multimeric TMAPP of the present disclosure comprises: a) a first polypeptide comprising, in order from N-terminus to C-terminus: i) an epitope; ii) an HLA β1 polypeptide; iii) an HLA α1 polypeptide; iv) an HLA α2 polypeptide; v) a dimerizer polypeptide; and vi) an Ig Fc polypeptide; and b) a second polypeptide comprising, in order from N-terminus to C-terminus: i) a first immunomodulatory polypeptide (e.g., a variant immunomodulatory polypeptide with reduced affinity for its cognate co-immunomodulatory polypeptide); ii) a second immunomodulatory polypeptide (e.g., a variant immunomodulatory polypeptide with reduced affinity for its cognate co-immunomodulatory polypeptide); iii) an HLA β2 polypeptide; and iv) a dimerizer polypeptide. As one non-limiting example, a multimeric TMAPP of the present disclosure can comprise: a) a first polypeptide comprising, in order from N-terminus to C-terminus: i) an epitope; ii) an HLA DRB1 β1 polypeptide; iii) an HLA DRA α1 polypeptide; iv) an HLA DRA α2 polypeptide; v) a leucine zipper dimerizer polypeptide; and vi) an IgG1 Fc polypeptide; and b) a second polypeptide comprising, in order from N-terminus to C-terminus: i) a first immunomodulatory polypeptide (e.g., a variant IL-2 polypeptide comprising H16A and F42A substitutions); ii) a second immunomodulatory polypeptide (e.g., a variant IL-2 polypeptide comprising H16A and F42A substitutions); iii) an HLA DRB1 β2 polypeptide; and iv) a leucine zipper dimerizer polypeptide. In some cases, the epitope is a cytomegalovirus (CMV) pp65 epitope (LPLKMLNIPSINVH; SEQ ID NO: 312). In some cases, the HLA DRB β1 polypeptide comprises the following amino acid sequence: DTRPRFLWQHKFECHFFNGTERVRLLERCIYNQEESVRFDSDVGEYRAVTELGRPAAEY WNSQKDLLEQRRAAVDTYCRHNYGVGESFTVQR (SEQ ID NO: 438). In some cases, the HLA DRA α1 polypeptide comprises the following amino acid sequence: IKEEHVIIQAEFYLNPDQSGEFMFDFDGDEIFHVDMAKKETVWRLEEFGRFASFEAQGAL ANIAVDKANLEIMTKRSNYTPITN (SEQ ID NO: 306). In some cases, the HLA DRA α2 polypeptide comprises the following amino acid sequence: VPPEVTVLTNSPVELREPNVLICFIDKFTPPVVNVTWLRNGKPVTTGVSETVFLPREDHL FRKFHYLPFLPSTEDVYDCRVEHWGLDEPLLKHWEFDAPSPLPET (SEQ ID NO: 307). In some cases, the leucine zipper polypeptide comprises the following amino acid sequence: LEIRAAFLRQRNTALRTEVAELEQEVQRLENEVSQYETRYGPLGGGK (SEQ ID NO: 308). In some cases, the IgG1 Fc polypeptide comprises the following amino acid sequence: DKTHTCPPCPAPELLGGPSVFLFPPKPKDTLMISRTPEVTCVVVDVSHEDPEVKFNWYV DGVEVHNAKTKPREEQYASTYRVVSVLTVLHQDWLNGKEYKCKVSNKALPAPIEKTIS KAKGQPREPQVYTLPPSREEMTKNQVSLTCLVKGFYPSDIAVEWESNGQPENNYKTTPP VLDSDGSFFLYSKLTVDKSRWQQGNVFSCSVMHEALHNHYTQKSLSLSPGK (SEQ ID NO: 309). In some cases, the variant IL-2 polypeptide comprises the following amino acid sequence: APTSSSTKKTQLQLEALLLDLQMILNGINNYKNPKLTRMLTAKFYMPKKATELKHLQCL EEELKPLEEVLNLAQSKNFHLRPRDLISNINVIVLELKGSETTFMCEYADETATIVEFLNR WITFCQSIISTLT (SEQ ID NO: 304), where the H16A and F42A substitutions are underlined. In some cases, the HLA DRB1 β2 polypeptide comprises the following amino acid sequence: VEPKVTVYPSKTQPLQHHNLLVCSVSGFYPGSIEVRWFRNGQEEKAGVVSTGLIQNGD WTFQTLVMLETVPRSGEVYTCQVEHPSVTSPLTVEWRARSESAQSKM (SEQ ID NO: 311). In some cases, the leucine zipper polypeptide comprises the following amino acid sequence: LEIEAAFLERENTALETRVAELRQRVQRLRNRVSQYRTRYGPLGGGK (SEQ ID NO: 278). In some cases, the first polypeptide comprises the 1637 amino acid sequence depicted in FIG. 30A, without the leader sequence and without the C-terminal linker and histidine tag. For example, in some cases, the first polypeptide comprises amino acids 21-629 of the 1637 amino acid sequence depicted in FIG. 30A. In some cases, the first polypeptide does not include the epitope LPLKMLNIPSINVH (SEQ ID NO: 312); instead, the epitope is substituted with a different epitope. In some cases, the second polypeptide comprises the amino acid sequence depicted in FIG. 25A, but without the leader peptide. Thus, for example, in some cases, the second polypeptide comprises amino acids 21-493 of the amino acid sequence depicted in FIG. 25A.

[0493] 4) 1639+1640. In some cases, a multimeric TMAPP of the present disclosure comprises: a) a first polypeptide comprising, in order from N-terminus to C-terminus: i) an epitope; ii) an HLA β1 polypeptide; iii) an HLA α1 polypeptide; iv) an HLA α2 polypeptide; v) a dimerizer polypeptide; and vi) an Ig Fc polypeptide; and b) a second polypeptide comprising, in order from N-terminus to C-terminus: i) a first immunomodulatory polypeptide (e.g., a variant immunomodulatory polypeptide with reduced affinity for its cognate co-immunomodulatory polypeptide); ii) a second immunomodulatory polypeptide (e.g., a variant immunomodulatory polypeptide with reduced affinity for its cognate co-immunomodulatory polypeptide); iii) an HLA β2 polypeptide; and iv) a dimerizer polypeptide. As one non-limiting example, a multimeric TMAPP of the present disclosure can comprise: a) a first polypeptide comprising, in order from N-terminus to C-terminus: i) an epitope; ii) an HLA DRB1-4 β1 polypeptide; iii) an HLA DRA α1 polypeptide; iv) an HLA DRA α2 polypeptide; v) a leucine zipper dimerizer polypeptide; and vi) an IgG1 Fc polypeptide; and b) a second polypeptide comprising, in order from N-terminus to C-terminus: i) a first immunomodulatory polypeptide (e.g., a variant IL-2 polypeptide comprising H16A and F42A substitutions); ii) a second immunomodulatory polypeptide (e.g., a variant IL-2 polypeptide comprising H16A and F42A substitutions); iii) an HLA DRB1-4 β2 polypeptide; and iv) a leucine zipper dimerizer polypeptide. In some cases, the epitope is proinsulin 73-90 (GAGSLQPLALEGSLQKR; SEQ ID NO: 72). In some cases, the HLA DRB1-4 β1 polypeptide comprises the following amino acid sequence: DTRPRFLEQVKHECHFFNGTERVRFLDRYFYHQEEYVRFDSDVGEYRAVTELGRPDAE YWNSQKDLLEQKRAAVDTYCRHNYGVGESFTVQR (SEQ ID NO: 439). In some cases, the HLA DRA α1 polypeptide comprises the following amino acid sequence: IKEEHVIIQAEFYLNPDQSGEFMFDFDGDEIFHVDMAKKETVWRLEEFGRFASFEAQGAL ANIAVDKANLEIMTKRSNYTPITN (SEQ ID NO: 306). In some cases, the HLA DRA α2 polypeptide comprises the following amino acid sequence: VPPEVTVLTNSPVELREPNVLICFIDKFTPPVVNVTWLRNGKPVTTGVSETVFLPREDHL FRKFHYLPFLPSTEDVYDCRVEHWGLDEPLLKHWEFDAPSPLPET (SEQ ID NO: 307). In some cases, the leucine zipper polypeptide comprises the following amino acid sequence: LEIRAAFLRQRNTALRTEVAELEQEVQRLENEVSQYETRYGPLGGGK (SEQ ID NO: 308). In some cases, the IgG1 Fc polypeptide comprises the following amino acid sequence: DKTHTCPPCPAPELLGGPSVFLFPPKPKDTLMISRTPEVTCVVVDVSHEDPEVKFNWYV DGVEVHNAKTKPREEQYASTYRVVSVLTVLHQDWLNGKEYKCKVSNKALPAPIEKTIS KAKGQPREPQVYTLPPSREEMTKNQVSLTCLVKGFYPSDIAVEWESNGQPENNYKTTPP VLDSDGSFFLYSKLTVDKSRWQQGNVFSCSVMHEALHNHYTQKSLSLSPGK (SEQ ID NO: 309). In some cases, the variant IL-2 polypeptide comprises the following amino acid sequence: APTSSSTKKTQLQLEALLLDLQMILNGINNYKNPKLTRMLTAKFYMPKKATELKHLQCL EEELKPLEEVLNLAQSKNFHLRPRDLISNINVIVLELKGSETTFMCEYADETATIVEFLNR WITFCQSIISTLT (SEQ ID NO: 304), where the H16A and F42A substitutions are underlined. In some cases, the HLA DRB1-4 β2 polypeptide comprises the following amino acid sequence: VYPEVTVYPAKTQPLQHHNLLVCSVNGFYPASIEVRWFRNGQEEKTGVVSTGLIQNGD WTFQTLVMLETVPRSGEVYTCQVEHPSLTSPLTVEWRARSESAQSKM (SEQ ID NO: 313). In some cases, the leucine zipper polypeptide comprises the following amino acid sequence: LEIEAAFLERENTALETRVAELRQRVQRLRNRVSQYRTRYGPLGGGK (SEQ ID NO: 278). In some cases, the first polypeptide comprises the amino acid sequence depicted in FIG. 31A, without the leader peptide and without the C-terminal linker and histidine tag. For example, in some cases, the first polypeptide comprises amino acids 21-633 of the amino acid sequence depicted in FIG. 31A. In some cases, the epitope is not proinsulin 73-90 (GAGSLQPLALEGSLQKR; SEQ ID NO: 72); instead, the epitope is substituted with a different epitope. In some cases, the second polypeptide comprises the amino acid sequence depicted in FIG. 32A, without the leader peptide. For example, in some cases, the second polypeptide comprises amino acids 21-493 of the amino acid sequence depicted in FIG. 32A.

[0494] 5) 1711+1705. In some cases, a multimeric TMAPP of the present disclosure comprises: a) a first polypeptide comprising, in order from N-terminus to C-terminus: i) an epitope; ii) an HLA β1 polypeptide; iii) an HLA α1 polypeptide; and iv) an HLA α2 polypeptide; and b) a second polypeptide comprising, in order from N-terminus to C-terminus: i) a first immunomodulatory polypeptide (e.g., a variant immunomodulatory polypeptide with reduced affinity for its cognate co-immunomodulatory polypeptide); ii) a second immunomodulatory polypeptide (e.g., a variant immunomodulatory polypeptide with reduced affinity for its cognate co-immunomodulatory polypeptide); iii) an HLA β2 polypeptide; and iv) an Ig Fc polypeptide. As one non-limiting example, a multimeric TMAPP of the present disclosure can comprise: a) a first polypeptide comprising, in order from N-terminus to C-terminus: i) an epitope; ii) an HLA DRB1 β1 polypeptide; iii) an HLA DRA α1 polypeptide; and iv) an HLA DRA α2 polypeptide; and b) a second polypeptide comprising, in order from N-terminus to C-terminus: i) a first immunomodulatory polypeptide (e.g., a variant IL-2 polypeptide comprising H16A and F42A substitutions); ii) a second immunomodulatory polypeptide (e.g., a variant IL-2 polypeptide comprising H16A and F42A substitutions); iii) an HLA DRB1 β2 polypeptide; and iv) an IgG Fc polypeptide. The multimeric TMAPP can include a variant IgG Fc polypeptide. For example, a multimeric TMAPP of the present disclosure can comprise: a) a first polypeptide comprising, in order from N-terminus to C-terminus: i) an epitope; ii) an HLA DRB1 β1 polypeptide; iii) an HLA DRA α1 polypeptide; and iv) an HLA DRA α2 polypeptide; and b) a second polypeptide comprising, in order from N-terminus to C-terminus: i) a first immunomodulatory polypeptide (e.g., a variant IL-2 polypeptide comprising H16A and F42A substitutions); ii) a second immunomodulatory polypeptide (e.g., a variant IL-2 polypeptide comprising H16A and F42A substitutions); iii) an HLA DRB1 β2 polypeptide; and iv) an IgG1 Fc polypeptide comprising L234A and L235A substitutions. The multimeric TMAPP can include one or more linkers. For example, a multimeric TMAPP of the present disclosure can comprise: a) a first polypeptide comprising, in order from N-terminus to C-terminus: i) an epitope; ii) a peptide linker; iii) an HLA DRB1 β1 polypeptide; iv) a peptide linker; v) an HLA DRA α1 polypeptide; and vi) an HLA DRA α2 polypeptide; and b) a second polypeptide comprising, in order from N-terminus to C-terminus: i) a first immunomodulatory polypeptide (e.g., a variant IL-2 polypeptide comprising H16A and F42A substitutions); ii) a second immunomodulatory polypeptide (e.g., a variant IL-2 polypeptide comprising H16A and F42A substitutions); iii) a peptide linker; iv) an HLA DRB1 β2 polypeptide; v) a peptide linker; and vi) an Ig Fc polypeptide (e.g., an IgG1 Fc polypeptide comprising L234A and L235A substitutions). For example, a multimeric TMAPP of the present disclosure can comprise: a) a first polypeptide comprising, in order from N-terminus to C-terminus: i) an epitope; ii) the peptide linker (GGGGS)₃ (SEQ ID NO: 301); iii) an HLA DRB1 β1 polypeptide; iv) the peptide linker GGGGS (SEQ ID NO: 444); v) an HLA DRA α1 polypeptide; and vi) an HLA DRA α2 polypeptide; and b) a second polypeptide comprising, in order from N-terminus to C-terminus: i) a first immunomodulatory polypeptide (e.g., a variant IL-2 polypeptide comprising H16A and F42A substitutions); ii) a second immunomodulatory polypeptide (e.g., a variant IL-2 polypeptide comprising H16A and F42A substitutions); iii) the peptide linker (GGGGS)₄ (SEQ ID NO: 1); iv) an HLA DRB1 β2 polypeptide; v) the peptide linker (GGGGS)₆ (SEQ ID NO: 1); and vi) an Ig Fc polypeptide (e.g., an IgG1 Fc polypeptide comprising L234A and L235A substitutions). For example, a multimeric TMAPP of the present disclosure can comprise: a) a first polypeptide comprising, in order from N-terminus to C-terminus: i) an epitope; ii) the peptide linker (GGGGS)₃ (SEQ ID NO: 301); iii) an HLA DRB1 β1 polypeptide; iv) the peptide linker GGGGS (SEQ ID NO: 444); v) an HLA DRA α1 polypeptide; and vi) an HLA DRA α2 polypeptide; and b) a second polypeptide comprising, in order from N-terminus to C-terminus: i) a first variant IL-2 polypeptide comprising H16A and F42A substitutions; ii) a second variant IL-2 polypeptide comprising H16A and F42A substitutions (e.g., where the first and the second variant IL-2 polypeptides comprise the same amino acid sequence); iii) the peptide linker (GGGGS)₄ (SEQ ID NO: 1); iv) an HLA DRB1 β2 polypeptide; v) the peptide linker (GGGGS)₆ (SEQ ID NO: 1); and vi) an IgG1 Fc polypeptide comprising L234A and L235A substitutions. In some cases, the HLA DRB1 β1 polypeptide comprises the following amino acid sequence: GDTRPRFLWQHKFECHFFNGTERVRLLERCIYNQEESVRFDSDVGEYRAVTELGRPDAE YWNSQKDLLEQRRAAVDTYCRHNYGVGESFTVQR (SEQ ID NO: 314). In some cases, the HLA DRB1 β1 polypeptide comprises the following amino acid sequence: DTRPRFLWQHKFECHFFNGTERVRLLERCIYNQEESVRFDSDVGEYRAVTELGRPDAEY WNSQKDLLEQRRAAVDTYCRHNYGVGESFTVQRRVEP (SEQ ID NO: 315). In some cases, the HLA DRA α1 polypeptide comprises the following amino acid sequence: IKEEHVIIQAEFYLNPDQSGEFMFDFDGDEIFHVDMAKKETVWRLEEFGRFASFEAQGAL ANIAVDKANLEIMTKRSNY (SEQ ID NO: 316). In some cases, the HLA DRA α2 polypeptide comprises the following amino acid sequence: EVTVLTNSPVELREPNVLICFIDKFTPPVVNVTWLRNGKPVTTGVSETVFLPREDHLFRK FHYLPFLPSTEDVYDCRVEHWGLDEPLLKHWEFDA (SEQ ID NO: 317). In some cases, the HLA DRB1 β2 polypeptide comprises the following amino acid sequence: VEPKVTVYPSKTQPLQHHNLLVCSVSGFYPGSIEVRWFRNGQEEKAGVVSTGLIQNGD WTFQTLVMLETVPRSGEVYTCQVEHPSVTSPLTVEWRARSESAQSKM (SEQ ID NO: 311). In some cases, the first and the second immunomodulatory polypeptides are variant IL-2 polypeptides, both comprising the amino acid sequence: APTSSSTKKTQLQLEALLLDLQMILNGINNYKNPKLTRMLTAKFYMPKKATELKHLQCL EEELKPLEEVLNLAQSKNFHLRPRDLISNINVIVLELKGSETTFMCEYADETATIVEFLNR WITFCQSIISTLT (SEQ ID NO: 304). In some cases, the Fc polypeptide is an IgG1 Fc polypeptide comprising L234A and L235A substitutions, and comprises the amino acid sequence: DKTHTCPPCPAPEAAGGPSVFLFPPKPKDTLMISRTPEVTCVVVDVSHEDPEVKFNWYV DGVEVHNAKTKPREEQYNSTYRVVSVLTVLHQDWLNGKEYKCKVSNKALPAPIEKTIS KAKGQPREPQVYTLPPSREEMTKNQVSLTCLVKGFYPSDIAVEWESNGQPENNYKTTPP VLDSDGSFFLYSKLTVDKSRWQQGNVFSCSVMHEALHNHYTQKSLSLSPGK (SEQ ID NO: 318). In some cases, a TMAPP of the present disclosure comprises: a) a first polypeptide comprising amino acids 21-328 of the amino acid sequence depicted in FIG. 37A; and b) a second polypeptide comprising amino acids 21-688 of the amino acid sequence depicted in FIG. 38A. In some cases, a TMAPP of the present disclosure comprises: a) a first polypeptide encoded by the nucleotide sequence depicted in FIG. 37B; and b) a second polypeptide encoded by the nucleotide sequence depicted in FIG. 38B.

### Single-Chain TMAPPs

[0495] The following are non-limiting examples of single-chain TMAPPs of the present disclosure. See, e.g., FIG. 28A (1599 polypeptide); and FIG. 29A (1601 polypeptide). A TMAPP to be administered to an individual in need thereof will generally not include a leader sequence or a histidine tag as depicted in the aforementioned figures.

[0496] 1) 1599. In some cases, a single-chain TMAPP of the present disclosure comprises, in order from N-terminus to C-terminus: i) an epitope; ii) an HLA β1 polypeptide; iii) an HLA α1 polypeptide; iv) an HLA α2 polypeptide; v) an HLA β2 polypeptide; vi) an immunomodulatory polypeptide (e.g., a variant immunomodulatory polypeptide with reduced affinity for its cognate co-immunomodulatory polypeptide); and vii) an Ig Fc polypeptide. As one non-limiting example, a single-chain TMAPP of the present disclosure can comprise, in order from N-terminus to C-terminus: i) an epitope; ii) an HLA DRB1 β1 polypeptide; iii) an HLA DRA α1 polypeptide; iv) an HLA DRA α2 polypeptide; v) an HLA DRB β2 polypeptide; vi) an immunomodulatory polypeptide (e.g., a variant IL-2 polypeptide comprising H16A and F42A substitutions); and vii) an IgG1 Fc polypeptide. In some cases, the epitope is a hemagglutinin epitope (e.g., PKYVKQNTLKLAT; SEQ ID NO: 303). In some cases, the HLA DRB1 β1 polypeptide comprises the following amino acid sequence: DTRPRFLWQHKFECHFFNGTERVRLLERCIYNQEESVRFDSDVGEYRAVTELGRPDAEY WNSQKDLLEQRRAAVDTYCRHNYGVGESFTVQRRVEP (SEQ ID NO: 315). In some cases, the HLA DRA α1 polypeptide comprises the following amino acid sequence: IKEEHVIIQAEFYLNPDQSGEFMFDFDGDEIFHVDMAKKETVWRLEEFGRFASFEAQGAL ANIAVDKANLEIMTKRSNYTPITN (SEQ ID NO: 306). In some cases, the HLA DRB β2 polypeptide comprises the following amino acid sequence: KVTVYPSKTQPLQHHNLLVCSVSGFYPGSIEVRWFRNGQEEKAGVVSTGLIQNGDWTF QTLVMLETVPRSGEVYTCQVEHPSVTSPLTVEWRARS (SEQ ID NO: 319). In some cases, the variant IL-2 polypeptide comprises the following amino acid sequence: APTSSSTKKTQLQLEALLLDLQMILNGINNYKNPKLTRMLTAKFYMPKKATELKHLQCL EEELKPLEEVLNLAQSKNFHLRPRDLISNINVIVLELKGSETTFMCEYADETATIVEFLNR WITFCQSIISTLT (SEQ ID NO: 304), where the H16A and F42A substitutions are underlined. In some cases, the IgG1 Fc polypeptide comprises the following amino acid sequence: DKTHTCPPCPAPELLGGPSVFLFPPKPKDTLMISRTPEVTCVVVDVSHEDPEVKFNWYV DGVEVHNAKTKPREEQYASTYRVVSVLTVLHQDWLNGKEYKCKVSNKALPAPIEKTIS KAKGQPREPQVYTLPPSREEMTKNQVSLTCLVKGFYPSDIAVEWESNGQPENNYKTTPP VLDSDGSFFLYSKLTVDKSRWQQGNVFSCSVMHEALHNHYTQKSLSLSPGK (SEQ ID NO: 309). In some cases, the single-chain polypeptide comprises the amino acid sequence depicted in FIG. 28A, without the leader peptide and without the C-terminal linker and histidine tag. For example, in some cases, the single-chain polypeptide comprises amino acids 21-981 of the amino acid sequence depicted in FIG. 28A. In some cases, the single-chain polypeptide does not include a hemagglutinin epitope (e.g., PKYVKQNTLKLAT; SEQ ID NO: 303); instead, the epitope is substituted with a different epitope.

[0497] 2) 1601. In some cases, a single-chain TMAPP of the present disclosure comprises, in order from N-terminus to C-terminus: i) an epitope; ii) an HLA β1 polypeptide; iii) an HLA α1 polypeptide; iv) an HLA α2 polypeptide; v) a first immunomodulatory polypeptide (e.g., a variant immunomodulatory polypeptide with reduced affinity for its cognate co-immunomodulatory polypeptide); vi) a second immunomodulatory polypeptide (e.g., a variant immunomodulatory polypeptide with reduced affinity for its cognate co-immunomodulatory polypeptide); and vii) an Ig Fc polypeptide. As one non-limiting example, a single-chain TMAPP of the present disclosure can comprise, in order from N-terminus to C-terminus: i) an epitope; ii) an HLA DRB1 β1 polypeptide; iii) an HLA DRA α1 polypeptide; iv) an HLA DRA α2 polypeptide; v) a first immunomodulatory polypeptide (e.g., a variant IL-2 polypeptide comprising H16A and F42A substitutions); vi) a second immunomodulatory polypeptide (e.g., a variant IL-2 polypeptide comprising H16A and F42A substitutions); and vii) an IgG1 Fc polypeptide. In some cases, the epitope is a hemagglutinin epitope (e.g., PKYVKQNTLKLAT; SEQ ID NO: 303). In some cases, the HLA DRB1 β1 polypeptide comprises the following amino acid sequence: DTRPRFLWQHKFECHFFNGTERVRLLERCIYNQEESVRFDSDVGEYRAVTELGRPDAEY WNSQKDLLEQRRAAVDTYCRHNYGVGESFTVQRRVEP (SEQ ID NO: 315). In some cases, the HLA DRA α1 polypeptide comprises the following amino acid sequence: IKEEHVIIQAEFYLNPDQSGEFMFDFDGDEIFHVDMAKKETVWRLEEFGRFASFEAQGAL ANIAVDKANLEIMTKRSNYTPITN (SEQ ID NO: 306). In some cases, the HLA DRA α2 polypeptide comprises the following amino acid sequence: VPPEVTVLTNSPVELREPNVLICFIDKFTPPVVNVTWLRNGKPVTTGVSETVFLPREDHL FRKFHYLPFLPSTEDVYDCRVEHWGLDEPLLKHWEFDA (SEQ ID NO: 320). In some cases, the variant IL-2 polypeptide comprises the following amino acid sequence: APTSSSTKKTQLQLEALLLDLQMILNGINNYKNPKLTRMLTAKFYMPKKATELKHLQCL EEELKPLEEVLNLAQSKNFHLRPRDLISNINVIVLELKGSETTFMCEYADETATIVEFLNR WITFCQSIISTLT (SEQ ID NO: 304), where the H16A and F42A substitutions are underlined. In some cases, the IgG1 Fc polypeptide comprises the following amino acid sequence: DKTHTCPPCPAPELLGGPSVFLFPPKPKDTLMISRTPEVTCVVVDVSHEDPEVKFNWYV DGVEVHNAKTKPREEQYASTYRVVSVLTVLHQDWLNGKEYKCKVSNKALPAPIEKTIS KAKGQPREPQVYTLPPSREEMTKNQVSLTCLVKGFYPSDIAVEWESNGQPENNYKTTPP VLDSDGSFFLYSKLTVDKSRWQQGNVFSCSVMHEALHNHYTQKSLSLSPGK (SEQ ID NO: 309). In some cases, the single-chain polypeptide comprises the amino acid sequence depicted in FIG. 29A, without the leader peptide and without the C-terminal linker and histidine tag. For example, in some cases, the single-chain polypeptide comprises amino acids 21-876 of the amino acid sequence depicted in FIG. 29A.

### Antigen-Presenting Polypeptides

[0498] The present disclosure provides an antigen-presenting polypeptide (APP) that does not include an immunomodulatory polypeptide. An APP of the present disclosure can be a single chain polypeptide or a multi-chain (multimeric) polypeptide. An APP of the present disclosure is useful for diagnostic applications and therapeutic applications.

### Multimeric Antigen-Presenting Polypeptides

[0499] In some cases, an APP of the present disclosure comprises two polypeptide chains. In some cases, the two polypeptide chains are covalently linked to one another, e.g., via a disulfide bond. In other instances, the two polypeptide chains are not covalently linked to one another. In some cases, the two polypeptide chains are not covalently linked to one another; and in some of these cases, each of the two polypeptide chains comprises a member of a dimerization pair. Examples of multimeric APPs of the present disclosure are depicted schematically in FIG. 43A and FIG. 43B.

[0500] In some cases, an antigen-presenting multimeric polypeptide (multimeric APP) of the present disclosure comprises: a) a first polypeptide comprising, in order from N-terminus to C-terminus: i) an MHC Class II α1 polypeptide; and ii) an MHC Class II α2 polypeptide; and b) a second polypeptide comprising, in order from N-terminus to C-terminus: i) a peptide antigen (an “epitope”) that is recognized (e.g., is capable of being recognized and bound) by a T-cell receptor (TCR); ii) an MHC Class II β1 polypeptide; and iii) an MHC Class II 2 polypeptide. In some cases, an APP of the present disclosure comprises: a) a first polypeptide comprising, in order from N-terminus to C-terminus: i) an MHC Class II α1 polypeptide; and ii) an MHC Class II α2 polypeptide; and b) a second polypeptide comprising, in order from N-terminus to C-terminus: i) a peptide antigen (an “epitope”) that is recognized (e.g., is capable of being recognized and bound) by a T-cell receptor (TCR); ii) an MHC Class II β1 polypeptide; iii) an MHC Class II β2 polypeptide; and iv) an immunoglobulin or non-immunoglobulin scaffold polypeptide. In some cases, an APP of the present disclosure comprises: a) a first polypeptide comprising, in order from N-terminus to C-terminus: i) an MHC Class II α1 polypeptide; and ii) an MHC Class II α2 polypeptide; and b) a second polypeptide comprising, in order from N-terminus to C-terminus: i) a peptide antigen (an “epitope”) that is recognized (e.g., is capable of being recognized and bound) by a T-cell receptor (TCR); ii) an MHC Class II β1 polypeptide; iii) an MHC Class II β2 polypeptide; and iv) an immunoglobulin (Ig) Fc polypeptide. In some cases, the second polypeptide comprises a linker between the peptide antigen and the MHC Class II β1 polypeptide. In some cases, the second polypeptide comprises a linker between the MHC Class II β1 polypeptide and the immunoglobulin or non-immunoglobulin scaffold polypeptide.

[0501] In some cases, an antigen-presenting multimeric polypeptide (a multimeric APP) of the present disclosure comprises: a) a first polypeptide comprising, in order from N-terminus to C-terminus: i) an MHC Class II α1 polypeptide; ii) an MHC Class II α2 polypeptide; and iii) a first member of a dimerizer pair; and b) a second polypeptide comprising, in order from N-terminus to C-terminus: i) a peptide antigen (an “epitope”) that is recognized (e.g., is capable of being recognized and bound) by a TCR; ii) an MHC Class II β1 polypeptide; iii) an MHC Class II β2 polypeptide; and iv) a second member of the dimerizer pair. The first and the second members of the dimerizer pair bind to one another non-covalently. In some cases, the first and the second members of the dimerizer pair bind to one another non-covalently without the need for a dimerization agent. In some cases, the first and the second members of the dimerizer pair bind to one another non-covalently in the presence of a dimerizer agent. In some cases, an APP of the present disclosure comprises: a) a first polypeptide comprising, in order from N-terminus to C-terminus: i) an MHC Class II α1 polypeptide; ii) an MHC Class II α2 polypeptide; and iii) a first member of a dimerizer pair; and b) a second polypeptide comprising, in order from N-terminus to C-terminus: i) a peptide antigen (an “epitope”) that is recognized (e.g., is capable of being recognized and bound) by a TCR; ii) an MHC Class II β1 polypeptide; iii) an MHC Class II β2 polypeptide; iv) a second member of the dimerizer pair; and v) an immunoglobulin or non-immunoglobulin scaffold polypeptide. In some cases, an APP of the present disclosure comprises: a) a first polypeptide comprising, in order from N-terminus to C-terminus: i) an MHC Class II α1 polypeptide; ii) an MHC Class II α2 polypeptide; and iii) a first member of a dimerizer pair; and b) a second polypeptide comprising, in order from N-terminus to C-terminus: i) a peptide antigen (an “epitope”) that is recognized (e.g., is capable of being recognized and bound) by a TCR; ii) an MHC Class II β1 polypeptide; iii) an MHC Class II β2 polypeptide; iv) a second member of the dimerizer pair; and v) an Ig Fc polypeptide. In some cases, an APP of the present disclosure comprises: a) a first polypeptide comprising, in order from N-terminus to C-terminus: i) an MHC Class II α1 polypeptide; ii) an MHC Class II α2 polypeptide; and iii) a first leucine zipper polypeptide; and b) a second polypeptide comprising, in order from N-terminus to C-terminus: i) a peptide antigen (an “epitope”) that is recognized (e.g., is capable of being recognized and bound) by a TCR; ii) an MHC Class II β1 polypeptide; iii) an MHC Class II β2 polypeptide; iv) a second leucine zipper polypeptide; and v) an Ig Fc polypeptide. In some cases, the second polypeptide comprises a linker between the peptide antigen and the MHC Class II β1 polypeptide. In some cases, the second polypeptide comprises a linker between the MHC Class II β1 polypeptide and the second member of the dimerizing pair. In some cases, the first polypeptide comprises a linker between the MHC Class II α2 polypeptide and the first member of the dimerizing pair.

[0502] In some cases, an antigen-presenting multimeric polypeptide (a multimeric APP) of the present disclosure comprises: a) a first polypeptide comprising, in order from N-terminus to C-terminus: i) a peptide antigen (an “epitope”) that is recognized (e.g., is capable of being recognized and bound) by a TCR; ii) an MHC Class II β1 polypeptide; iii) an MHC Class II α1 polypeptide; iv) an MHC Class II α2 polypeptide; and v) a first member of a dimerizing pair; and b) a second polypeptide comprising, in order from N-terminus to C-terminus: i) an MHC Class II β2 polypeptide; and ii) a second member of the dimerizing pair. In some cases, an APP of the present disclosure comprises: a) a first polypeptide comprising, in order from N-terminus to C-terminus: i) a peptide antigen (an “epitope”) that is recognized (e.g., is capable of being recognized and bound) by a TCR; ii) an MHC Class II β1 polypeptide; iii) an MHC Class II α1 polypeptide; iv) an MHC Class II α2 polypeptide; v) a first member of a dimerizing pair; vi) an immunoglobulin or non-immunoglobulin scaffold polypeptide; and b) a second polypeptide comprising, in order from N-terminus to C-terminus: i) an MHC Class II β2 polypeptide; and ii) a second member of the dimerizing pair. In some cases, an APP of the present disclosure comprises: a) a first polypeptide comprising, in order from N-terminus to C-terminus: i) a peptide antigen (an “epitope”) that is recognized (e.g., is capable of being recognized and bound) by a TCR; ii) an MHC Class II β1 polypeptide; iii) an MHC Class II α1 polypeptide; iv) an MHC Class II α2 polypeptide; v) a first member of a dimerizing pair; vi) an Ig Fc polypeptide; and b) a second polypeptide comprising, in order from N-terminus to C-terminus: i) an MHC Class II β2 polypeptide; and ii) a second member of the dimerizing pair. In some cases, an APP of the present disclosure comprises: a) a first polypeptide comprising, in order from N-terminus to C-terminus: i) a peptide antigen (an “epitope”) that is recognized (e.g., is capable of being recognized and bound) by a TCR; ii) an MHC Class II β1 polypeptide; iii) an MHC Class II α1 polypeptide; iv) an MHC Class II α2 polypeptide; v) a first leucine zipper polypeptide; vi) an Ig Fc polypeptide; and b) a second polypeptide comprising, in order from N-terminus to C-terminus: i) an MHC Class II β2 polypeptide; and ii) a second leucine zipper polypeptide. In some cases, the first polypeptide comprises a linker between the peptide antigen and the MHC Class II β1 polypeptide. In some cases, the first polypeptide comprises a linker between the MHC Class II β1 polypeptide and the MHC Class II α1 polypeptide. In some cases, the first polypeptide comprises a linker between the MHC Class II α2 polypeptide and the first member of the dimerizing pair. In some cases, the second polypeptide comprises a linker between the MHC Class II β2 polypeptide and the second member of the dimerizing pair.

### Monomeric Antigen-Presenting Polypeptides

[0503] In some cases, an APP of the present disclosure is a single polypeptide chain. Examples are depicted schematically in FIG. 43C and FIG. 44A.

[0504] In some cases, an APP (e.g., a single-chain APP) of the present disclosure comprises, in order from N-terminus to C-terminus: i) a peptide antigen (an “epitope”) that is recognized (e.g., is capable of being recognized and bound) by a TCR; ii) an MHC Class II β1 polypeptide; iii) an MHC Class II β2 polypeptide; iv) an MHC Class II α1 polypeptide; and v) an MHC Class II α2 polypeptide. In some cases, an APP of the present disclosure comprises, in order from N-terminus to C-terminus: i) a peptide antigen (an “epitope”) that is recognized (e.g., is capable of being recognized and bound) by a TCR; ii) an MHC Class II β1 polypeptide; iii) an MHC Class II β2 polypeptide; iv) an MHC Class II α1 polypeptide; v) an MHC Class II α2 polypeptide; and vi) an immunoglobulin or non-immunoglobulin scaffold polypeptide. In some cases, an APP of the present disclosure comprises, in order from N-terminus to C-terminus: i) a peptide antigen (an “epitope”) that is recognized (e.g., is capable of being recognized and bound) by a TCR; ii) an MHC Class II β1 polypeptide; iii) an MHC Class II β2 polypeptide; iv) an MHC Class II α1 polypeptide; v) an MHC Class II α2 polypeptide; and vi) an Ig Fc polypeptide. In some cases, the APP comprises a linker between the peptide antigen and the MHC Class II β1 polypeptide. In some cases, the APP comprises a linker between the MHC Class II β2 polypeptide and the MHC Class II α1 polypeptide. In some cases, the APP comprises a linker between the MHC Class II α2 polypeptide and the immunoglobulin or non-immunoglobulin scaffold.

[0505] In some cases, an APP of the present disclosure comprises, in order from N-terminus to C-terminus: i) a peptide antigen (an “epitope”) that is recognized (e.g., is capable of being recognized and bound) by a TCR; ii) an MHC Class II β1 polypeptide; iii) an MHC Class II α1 polypeptide; iv) an MHC Class II α2 polypeptide; and v) an MHC Class II 2 polypeptide. In some cases, an APP of the present disclosure comprises, in order from N-terminus to C-terminus: i) a peptide antigen (an “epitope”) that is recognized (e.g., is capable of being recognized and bound) by a TCR; ii) an MHC Class II β1 polypeptide; iii) an MHC Class II α1 polypeptide; iv) an MHC Class II α2 polypeptide; v) an MHC Class II β2 polypeptide; and vi) an immunoglobulin or non-immunoglobulin scaffold polypeptide. In some cases, an APP of the present disclosure comprises, in order from N-terminus to C-terminus: i) a peptide antigen (an “epitope”) that is recognized (e.g., is capable of being recognized and bound) by a TCR; ii) an MHC Class II β1 polypeptide; iii) an MHC Class II α1 polypeptide; iv) an MHC Class II α2 polypeptide; v) an MHC Class II β2 polypeptide; and vi) an Ig Fc polypeptide. In some cases, the APP comprises a linker between the peptide antigen and the MHC Class II 1 polypeptide. In some cases, the APP comprises a linker between the MHC Class II β1 polypeptide and the MHC Class II α1 polypeptide. In some cases, the APP comprises a linker between the MHC Class II α2 polypeptide and the MHC Class II β2 polypeptide. In some cases, the APP comprises a linker between the MHC Class II β2 polypeptide and the Ig or non-Ig scaffold.

[0506] In some cases, a single-chain APP of the present disclosure comprises, in order from N-terminus to C-terminus: i) an epitope; ii) an HLA β1 polypeptide; iii) an HLA α1 polypeptide; iv) an HLA α2 polypeptide; v) an HLA β2 polypeptide; and vi) an Ig Fc polypeptide. As one non-limiting example, a single-chain APP of the present disclosure can comprise, in order from N-terminus to C-terminus: i) an epitope; ii) an HLA DRB1 β1 polypeptide; iii) an HLA DRA α1 polypeptide; iv) an HLA DRA α2 polypeptide; v) an HLA DRB β2 polypeptide; and vi) an IgG1 Fc polypeptide. In some cases, the epitope is a hemagglutinin epitope (PKYVKQNTLKLAT; SEQ ID NO:303). In other instances, the epitope is not PKYVKQNTLKLAT (SEQ ID NO:303); instead, the epitope is substituted with a different epitope. In some cases, the single-chain polypeptide comprises the 1559 amino acid sequence depicted in FIG. 27A, without the leader peptide and without the C-terminal linker and histidine tag. For example, in some cases, the single-chain polypeptide comprises amino acids 21-700 of the amino acid sequence depicted in FIG. 27A.

### MHC Class II Polypeptides

[0507] As noted above, an APP of the present disclosure comprises MHC Class II polypeptides, i.e., an MHC Class II α chain polypeptide and an MHC Class II β chain polypeptide. Suitable MHC Class II α chain polypeptides and MHC Class II β chain polypeptides are described above.

### Fc Polypeptides

[0508] As noted above, in some cases, an APP of the present disclosure can comprise an Ig Fc polypeptide. For example, where the APP is a multimeric polypeptide, in some cases, the first and/or the second polypeptide chain of a multimeric polypeptide comprises an Fc polypeptide. In some cases, an APP of the present disclosure is a monomeric polypeptide and comprises an Ig Fc polypeptide. The Fc polypeptide can be a human IgG1 Fc, a human IgG2 Fc, a human IgG3 Fc, a human IgG4 Fc, etc.

[0509] In some cases, the Fc polypeptide comprises an amino acid sequence having at least about 70%, at least about 75%, at least about 80%, at least about 85%, at least about 90%, at least about 95%, at least about 98%, at least about 99%, or 100%, amino acid sequence identity to an amino acid sequence of an Fc region depicted in FIG. 21A-21G. In some cases, the Fc region comprises an amino acid sequence having at least about 70%, at least about 75%, at least about 80%, at least about 85%, at least about 90%, at least about 95%, at least about 98%, at least about 99%, or 100%, amino acid sequence identity to the human IgG1 Fc polypeptide depicted in FIG. 21A. In some cases, the Fc region comprises an amino acid sequence having at least about 70%, at least about 75%, at least about 80%, at least about 85%, at least about 90%, at least about 95%, at least about 98%, at least about 99%, or 100%, amino acid sequence identity to the human IgG1 Fc polypeptide depicted in FIG. 21A; and comprises a substitution of N77; e.g., the Fc polypeptide comprises an N77A substitution. In some cases, the Fc polypeptide comprises an amino acid sequence having at least about 70%, at least about 75%, at least about 80%, at least about 85%, at least about 90%, at least about 95%, at least about 98%, at least about 99%, or 100%, amino acid sequence identity to the human IgG2 Fc polypeptide depicted in FIG. 21A; e.g., the Fc polypeptide comprises an amino acid sequence having at least about 70%, at least about 75%, at least about 80%, at least about 85%, at least about 90%, at least about 95%, at least about 98%, at least about 99%, or 100%, amino acid sequence identity to amino acids 99-325 of the human IgG2 Fc polypeptide depicted in FIG. 21A. In some cases, the Fc polypeptide comprises an amino acid sequence having at least about 70%, at least about 75%, at least about 80%, at least about 85%, at least about 90%, at least about 95%, at least about 98%, at least about 99%, or 100%, amino acid sequence identity to the human IgG3 Fc polypeptide depicted in FIG. 21A; e.g., the Fc polypeptide comprises an amino acid sequence having at least about 70%, at least about 75%, at least about 80%, at least about 85%, at least about 90%, at least about 95%, at least about 98%, at least about 99%, or 100%, amino acid sequence identity to amino acids 19-246 of the human IgG3 Fc polypeptide depicted in FIG. 21A. In some cases, the Fc polypeptide comprises an amino acid sequence having at least about 70%, at least about 75%, at least about 80%, at least about 85%, at least about 90%, at least about 95%, at least about 98%, at least about 99%, or 100%, amino acid sequence identity to the human IgM Fc polypeptide depicted in FIG. 21B; e.g., the Fc polypeptide comprises an amino acid sequence having at least about 70%, at least about 75%, at least about 80%, at least about 85%, at least about 90%, at least about 95%, at least about 98%, at least about 99%, or 100%, amino acid sequence identity to amino acids 1-276 to the human IgM Fc polypeptide depicted in FIG. 21B. In some cases, the Fc polypeptide comprises an amino acid sequence having at least about 70%, at least about 75%, at least about 80%, at least about 85%, at least about 90%, at least about 95%, at least about 98%, at least about 99%, or 100%, amino acid sequence identity to the human IgA Fc polypeptide depicted in FIG. 21C; e.g., the Fc polypeptide comprises an amino acid sequence having at least about 70%, at least about 75%, at least about 80%, at least about 85%, at least about 90%, at least about 95%, at least about 98%, at least about 99%, or 100%, amino acid sequence identity to amino acids 1-234 to the human IgA Fc polypeptide depicted in FIG. 21C.

[0510] In some cases, the Fc polypeptide comprises an amino acid sequence having at least about 70%, at least about 75%, at least about 80%, at least about 85%, at least about 90%, at least about 95%, at least about 98%, at least about 99%, or 100%, amino acid sequence identity to the human IgG4 Fc polypeptide depicted in FIG. 21C. In some cases, the Fc polypeptide comprises an amino acid sequence having at least about 70%, at least about 75%, at least about 80%, at least about 85%, at least about 90%, at least about 95%, at least about 98%, at least about 99%, or 100%, amino acid sequence identity to amino acids 100 to 327 of the human IgG4 Fc polypeptide depicted in FIG. 21C.

[0511] In some cases, the IgG4 Fc polypeptide comprises the following amino acid sequence:

(SEQ ID NO: 321)
PPCPSCPAPEFLGGPSVFLFPPKPKDTLMISRTPEVTCVVVDVSQEDPE
VQFNWYVDGVEVHNAKTKPREEQFNSTYRVVSVLTVLHQDWLNGKEYKC
KVSNKGLPSSIEKTISKAKGQPREPQVYTLPPSQEEMTKNQVSLTCLVK
GFYPSDIAVEWESNGQPENNYKTTPPVLDSDGSFFLYSRLTVDKSRWQE
GNVFSCSVMHEALHNHYTQKSLSLSPG.

[0512] In some cases, the Fc polypeptide present in an APP of the present disclosure comprises the amino acid sequence depicted in FIG. 21A (human IgG1 Fc). In some cases, the Fc polypeptide present in an APP of the present disclosure comprises the amino acid sequence depicted in FIG. 21A (human IgG1 Fc), except for a substitution of N297 (N77 of the amino acid sequence depicted in FIG. 21A) with an amino acid other than asparagine. In some cases, the Fc polypeptide present in an APP of the present disclosure comprises the amino acid sequence depicted in FIG. 21C (human IgG1 Fc comprising an N297A substitution, which is N77 of the amino acid sequence depicted in FIG. 21A). In some cases, the Fc polypeptide present in an APP of the present disclosure comprises the amino acid sequence depicted in FIG. 21A (human IgG1 Fc), except for a substitution of L234 (L14 of the amino acid sequence depicted in FIG. 21A) with an amino acid other than leucine. In some cases, the Fc polypeptide present in an APP of the present disclosure comprises the amino acid sequence depicted in FIG. 21A (human IgG1 Fc), except for a substitution of L235 (L15 of the amino acid sequence depicted in FIG. 21A) with an amino acid other than leucine.

[0513] In some cases, the Fc polypeptide present in an APP of the present disclosure comprises the amino acid sequence depicted in FIG. 21E. In some cases, the Fc polypeptide present in an APP of the present disclosure comprises the amino acid sequence depicted in FIG. 21F. In some cases, the Fc polypeptide present in an APP of the present disclosure comprises the amino acid sequence depicted in FIG. 21G (human IgG1 Fc comprising an L234A substitution and an L235A substitution, corresponding to positions 14 and 15 of the amino acid sequence depicted in FIG. 21G). In some cases, the Fc polypeptide present in an APP of the present disclosure comprises the amino acid sequence depicted in FIG. 21A (human IgG1 Fc), except for a substitution of P331 (P111 of the amino acid sequence depicted in FIG. 21A) with an amino acid other than proline; in some cases, the substitution is a P331S substitution. In some cases, the Fc polypeptide present in an APP of the present disclosure comprises the amino acid sequence depicted in FIG. 21A (human IgG1 Fc), except for substitutions at L234 and L235 (L14 and L15 of the amino acid sequence depicted in FIG. 21A) with amino acids other than leucine. In some cases, the Fc polypeptide present in an APP of the present disclosure comprises the amino acid sequence depicted in FIG. 21A (human IgG1 Fc), except for substitutions at L234 and L235 (L14 and L15 of the amino acid sequence depicted in FIG. 21A) with amino acids other than leucine, and a substitution of P331 (P111 of the amino acid sequence depicted in FIG. 21A) with an amino acid other than proline. In some cases, the Fc polypeptide present in an APP of the present disclosure comprises the amino acid sequence depicted in FIG. 21E (human IgG1 Fc comprising L234F, L235E, and P331S substitutions (corresponding to amino acid positions 14, 15, and 111 of the amino acid sequence depicted in FIG. 21E). In some cases, the Fc polypeptide present in an APP of the present disclosure is an IgG1 Fc polypeptide that comprises L234A and L235A substitutions (substitutions of L14 and L15 of the amino acid sequence depicted in FIG. 21A with Ala), as depicted in FIG. 21G.

### Nucleic Acids

[0514] The present disclosure provides a nucleic acid comprising a nucleotide sequence encoding a TMAPP of the present disclosure. In some cases, the nucleic acid is a recombinant expression vector; thus, the present disclosure provides a recombinant expression vector comprising a nucleotide sequence encoding a TMAPP of the present disclosure. The present disclosure provides a nucleic acid comprising a nucleotide sequence encoding an APP of the present disclosure. In some cases, the nucleic acid is a recombinant expression vector; thus, the present disclosure provides a recombinant expression vector comprising a nucleotide sequence encoding an APP of the present disclosure. The discussion, below, of nucleic acids refers to nucleic acids encoding TMAPPs of the present disclosure; however, the discussion applies as well to nucleic acids encoding APPs of the present disclosure.

### Nucleic Acids Encoding Single-Chain Antigen-Presenting Polypeptides of the Present Disclosure

[0515] As described above, in some cases, a TMAPP of the present disclosure comprises a single polypeptide chain. Thus, the present disclosure provides a nucleic acid comprising a nucleotide sequence encoding a single-chain TMAPP of the present disclosure. A nucleotide sequence comprising a nucleotide sequence encoding a single-chain TMAPP of the present disclosure can be operably linked to a transcription control element(s), e.g., a promoter.

### Nucleic Acid(s) Encoding Multimeric Polypeptides of the Present Disclosure

[0516] As noted above, in some cases, a TMAPP of the present disclosure comprises at least 2 separate polypeptide chains. The present disclosure provides nucleic acids comprising nucleotide sequences encoding a multimeric TMAPP of the present disclosure. In some cases, the individual polypeptide chains of a multimeric TMAPP of the present disclosure are encoded in separate nucleic acids. In some cases, all polypeptide chains of a multimeric polypeptide of the present disclosure are encoded in a single nucleic acid. In some cases, a first nucleic acid comprises a nucleotide sequence encoding a first polypeptide of a multimeric polypeptide of the present disclosure; and a second nucleic acid comprises a nucleotide sequence encoding a second polypeptide of a multimeric polypeptide of the present disclosure. In some cases, single nucleic acid comprises a nucleotide sequence encoding a first polypeptide of a multimeric polypeptide of the present disclosure and a second polypeptide of a multimeric polypeptide of the present disclosure.

### Separate Nucleic Acids Encoding Individual Polypeptide Chains of a Multimeric TMAPP

[0517] The present disclosure provides nucleic acids comprising nucleotide sequences encoding a TMAPP of the present disclosure. As noted above, in some cases, the individual polypeptide chains of a multimeric TMAPP of the present disclosure are encoded in separate nucleic acids. In some cases, nucleotide sequences encoding the separate polypeptide chains of a TMAPP of the present disclosure are operably linked to transcriptional control elements, e.g., promoters, such as promoters that are functional in a eukaryotic cell, where the promoter can be a constitutive promoter or an inducible promoter.

[0518] For example, the present disclosure provides a first nucleic acid and a second nucleic acid, where the first nucleic acid comprises a nucleotide sequence encoding the first polypeptide of a TMAPP of the present disclosure, and where the second nucleic acid comprises a nucleotide sequence encoding the second polypeptide of the TMAPP. In some cases, the nucleotide sequences encoding the first and the second polypeptides are operably linked to transcriptional control elements. In some cases, the transcriptional control element is a promoter that is functional in a eukaryotic cell. In some cases, the nucleic acids are present in separate expression vectors.

[0519] In some cases, the nucleotide sequences encoding the first and the second polypeptides are operably linked to transcriptional control elements. In some cases, the transcriptional control element is a promoter that is functional in a eukaryotic cell. In some cases, the nucleic acids are present in separate expression vectors.

### Nucleic Acid Encoding Two or More Polypeptides Present in a TMAPP

[0520] The present disclosure provides a nucleic acid comprising nucleotide sequences encoding at least the first polypeptide and the second polypeptide of a TMAPP of the present disclosure. In some cases, where a TMAPP of the present disclosure includes a first, second, and third polypeptide, the nucleic acid includes a nucleotide sequence encoding the first, second, and third polypeptides. In some cases, the nucleotide sequences encoding the first polypeptide and the second polypeptide of a TMAPP of the present disclosure includes a proteolytically cleavable linker interposed between the nucleotide sequence encoding the first polypeptide and the nucleotide sequence encoding the second polypeptide. In some cases, the nucleotide sequences encoding the first polypeptide and the second polypeptide of a TMAPP of the present disclosure includes an internal ribosome entry site (IRES) interposed between the nucleotide sequence encoding the first polypeptide and the nucleotide sequence encoding the second polypeptide. In some cases, the nucleotide sequences encoding the first polypeptide and the second polypeptide of a TMAPP of the present disclosure includes a ribosome skipping signal (or cis-acting hydrolase element, CHYSEL) interposed between the nucleotide sequence encoding the first polypeptide and the nucleotide sequence encoding the second polypeptide. Examples of nucleic acids are described below, where a proteolytically cleavable linker is provided between nucleotide sequences encoding the first polypeptide and the second polypeptide of a TMAPP of the present disclosure; in any of these embodiments, an IRES or a ribosome skipping signal can be used in place of the nucleotide sequence encoding the proteolytically cleavable linker.

[0521] In some cases, a first nucleic acid (e.g., a recombinant expression vector, an mRNA, a viral RNA, etc.) comprises a nucleotide sequence encoding a first polypeptide chain of a TMAPP of the present disclosure; and a second nucleic acid (e.g., a recombinant expression vector, an mRNA, a viral RNA, etc.) comprises a nucleotide sequence encoding a second polypeptide chain of a TMAPP of the present disclosure. In some cases, the nucleotide sequence encoding the first polypeptide, and the second nucleotide sequence encoding the second polypeptide, are each operably linked to transcriptional control elements, e.g., promoters, such as promoters that are functional in a eukaryotic cell, where the promoter can be a constitutive promoter or an inducible promoter.

### Recombinant Expression Vectors

[0522] The present disclosure provides recombinant expression vectors comprising nucleic acids of the present disclosure. In some cases, the recombinant expression vector is a non-viral vector. In some cases, the recombinant expression vector is a viral construct, e.g., a recombinant adeno-associated virus construct (see, e.g., U.S. Pat. No. 7,078,387), a recombinant adenoviral construct, a recombinant lentiviral construct, a recombinant retroviral construct, a non-integrating viral vector, etc.

[0523] Suitable expression vectors include, but are not limited to, viral vectors (e.g. viral vectors based on vaccinia virus; poliovirus; adenovirus (see, e.g., Li et al., Invest Opthalmol Vis Sci 35:2543 2549, 1994; Borras et al., Gene Ther 6:515 524, 1999; Li and Davidson, PNAS 92:7700 7704, 1995; Sakamoto et al., H Gene Ther 5:1088 1097, 1999; WO 94/12649, WO 93/03769; WO 93/19191; WO 94/28938; WO 95/11984 and WO 95/00655); adeno-associated virus (see, e.g., Ali et al., Hum Gene Ther 9:81 86, 1998, Flannery et al., PNAS 94:6916 6921, 1997; Bennett et al., Invest Opthalmol Vis Sci 38:2857 2863, 1997; Jomary et al., Gene Ther 4:683 690, 1997, Rolling et al., Hum Gene Ther 10:641 648, 1999; Ali et al., Hum Mol Genet 5:591 594, 1996; Srivastava in WO 93/09239, Samulski et al., J. Vir. (1989) 63:3822-3828; Mendelson et al., Virol. (1988) 166:154-165; and Flotte et al., PNAS (1993) 90:10613-10617); SV40; herpes simplex virus; human immunodeficiency virus (see, e.g., Miyoshi et al., PNAS 94:10319 23, 1997; Takahashi et al., J Virol 73:7812 7816, 1999); a retroviral vector (e.g., Murine Leukemia Virus, spleen necrosis virus, and vectors derived from retroviruses such as Rous Sarcoma Virus, Harvey Sarcoma Virus, avian leukosis virus, a lentivirus, human immunodeficiency virus, myeloproliferative sarcoma virus, and mammary tumor virus); and the like. Numerous suitable expression vectors are known to those of skill in the art, and many are commercially available.

[0524] Depending on the host/vector system utilized, any of a number of suitable transcription and translation control elements, including constitutive and inducible promoters, transcription enhancer elements, transcription terminators, etc. may be used in the expression vector (see e.g., Bitter et al. (1987) Methods in Enzymology, 153:516-544).

[0525] In some cases, a nucleotide sequence encoding a TMAPP of the present disclosure is operably linked to a control element, e.g., a transcriptional control element, such as a promoter. The transcriptional control element may be functional in either a eukaryotic cell, e.g., a mammalian cell; or a prokaryotic cell (e.g., bacterial or archaeal cell). In some cases, a nucleotide sequence encoding a DNA-targeting RNA and/or a site-directed modifying polypeptide is operably linked to multiple control elements that allow expression of the nucleotide sequence encoding a DNA-targeting RNA and/or a site-directed modifying polypeptide in both prokaryotic and eukaryotic cells.

[0526] Non-limiting examples of suitable eukaryotic promoters (promoters functional in a eukaryotic cell) include those from cytomegalovirus (CMV) immediate early, herpes simplex virus (HSV) thymidine kinase, early and late SV40, long terminal repeats (LTRs) from retrovirus, and mouse metallothionein-I. Selection of the appropriate vector and promoter is well within the level of ordinary skill in the art. The expression vector may also contain a ribosome binding site for translation initiation and a transcription terminator. The expression vector may also include appropriate sequences for amplifying expression.

### Genetically Modified Host Cells

[0527] The present disclosure provides a genetically modified host cell, where the host cell is genetically modified with a nucleic acid(s) of the present disclosure.

[0528] Suitable host cells include eukaryotic cells, such as yeast cells, insect cells, and mammalian cells. In some cases, the host cell is a cell of a mammalian cell line. Suitable mammalian cell lines include human cell lines, non-human primate cell lines, rodent (e.g., mouse, rat) cell lines, and the like. Suitable mammalian cell lines include, but are not limited to, HeLa cells (e.g., American Type Culture Collection (ATCC) No. CCL-2), CHO cells (e.g., ATCC Nos. CRL9618, CCL61, CRL9096), 293 cells (e.g., ATCC No. CRL-1573), Vero cells, NIH 3T3 cells (e.g., ATCC No. CRL-1658), Huh-7 cells, BHK cells (e.g., ATCC No. CCL10), PC12 cells (ATCC No. CRL1721), COS cells, COS-7 cells (ATCC No. CRL1651), RAT1 cells, mouse L cells (ATCC No. CCLI.3), human embryonic kidney (HEK) cells (ATCC No. CRL1573), HLHepG2 cells, and the like.

[0529] Genetically modified host cells can be used to produce a TMAPP or an APP of the present disclosure. For example, a genetically modified host cell can be used to produce a multimeric TMAPP of the present disclosure, or a single-chain TMAPP of the present disclosure. An expression vector(s) comprising nucleotide sequences encoding the polypeptide(s) is/are introduced into a host cell, generating a genetically modified host cell, which genetically modified host cell produces the polypeptide(s).

### Compositions

[0530] The present disclosure provides compositions, including pharmaceutical compositions, comprising a TMAPP or an APP of the present disclosure. The present disclosure provides compositions, including pharmaceutical compositions, comprising a nucleic acid or a recombinant expression vector of the present disclosure. The discussion, below, of compositions refers to compositions comprising a TMAPP of the present disclosure; however, the discussion applies equally to an APP of the present disclosure.

### Compositions Comprising an Antigen-Presenting Polypeptide

[0531] A composition of the present disclosure can comprise, in addition to a TMAPP of the present disclosure, one or more of: a salt, e.g., NaCl, MgCl₂, KCl, MgSO₄, etc.; a buffering agent, e.g., a Tris buffer, N-(2-Hydroxyethyl)piperazine-N′-(2-ethanesulfonic acid) (HEPES), 2-(N-Morpholino)ethanesulfonic acid (MES), 2-(N-Morpholino)ethanesulfonic acid sodium salt (MES), 3-(N-Morpholino)propanesulfonic acid (MOPS), N-tris[Hydroxymethyl]methyl-3-aminopropanesulfonic acid (TAPS), etc.; a solubilizing agent; a detergent, e.g., a non-ionic detergent such as Tween-20, etc.; a protease inhibitor; glycerol; and the like.

[0532] The composition may comprise a pharmaceutically acceptable excipient, a variety of which are known in the art and need not be discussed in detail herein. Pharmaceutically acceptable excipients have been amply described in a variety of publications, including, for example, “Remington: The Science and Practice of Pharmacy”, 19^{th} Ed. (1995), or latest edition, Mack Publishing Co; A. Gennaro (2000) “Remington: The Science and Practice of Pharmacy”, 20th edition, Lippincott, Williams, & Wilkins; Pharmaceutical Dosage Forms and Drug Delivery Systems (1999) H. C. Ansel et al., eds 7^{th} ed., Lippincott, Williams, & Wilkins; and Handbook of Pharmaceutical Excipients (2000) A. H. Kibbe et al., eds., 3^{rd} ed. Amer. Pharmaceutical Assoc.

[0533] A pharmaceutical composition can comprise: i) a TMAPP of the present disclosure; and ii) a pharmaceutically acceptable excipient. In some cases, a subject pharmaceutical composition will be suitable for administration to a subject, e.g., will be sterile. For example, in some embodiments, a subject pharmaceutical composition will be suitable for administration to a human subject, e.g., where the composition is sterile and is free of detectable pyrogens and/or other toxins.

[0534] The protein compositions may comprise other components, such as pharmaceutical grades of mannitol, lactose, starch, magnesium stearate, sodium saccharin, talcum, cellulose, glucose, sucrose, magnesium, carbonate, and the like. The compositions may contain pharmaceutically acceptable auxiliary substances as required to approximate physiological conditions such as pH adjusting and buffering agents, toxicity adjusting agents and the like, for example, sodium acetate, sodium chloride, potassium chloride, calcium chloride, sodium lactate, hydrochloride, sulfate salts, solvates (e.g., mixed ionic salts, water, organics), hydrates (e.g., water), and the like.

[0535] For example, compositions may include aqueous solution, powder form, granules, tablets, pills, suppositories, capsules, suspensions, sprays, and the like. The composition may be formulated according to the various routes of administration described below.

[0536] Where a TMAPP of the present disclosure is administered as an injectable (e.g. subcutaneously, intraperitoneally, intramuscularly, intralymphatically, and/or intravenously) directly into a tissue, a formulation can be provided as a ready-to-use dosage form, or as non-aqueous form (e.g. a reconstitutable storage-stable powder) or aqueous form, such as liquid composed of pharmaceutically acceptable carriers and excipients. The protein-containing formulations may also be provided so as to enhance serum half-life of the subject protein following administration. For example, the protein may be provided in a liposome formulation, prepared as a colloid, or other conventional techniques for extending serum half-life. A variety of methods are available for preparing liposomes, as described in, e.g., Szoka et al. 1980 Ann. Rev. Biophys. Bioeng. 9:467, U.S. Pat. Nos. 4,235,871, 4,501,728 and 4,837,028. The preparations may also be provided in controlled release or slow-release forms.

[0537] In some cases, a composition of the present disclosure comprises: a) a TMAPP of the present disclosure; and b) saline (e.g., 0.9% NaCl). In some cases, the composition is sterile. In some cases, the composition is suitable for administration to a human subject, e.g., where the composition is sterile and is free of detectable pyrogens and/or other toxins. Thus, the present disclosure provides a composition comprising: a) a TMAPP of the present disclosure; and b) saline (e.g., 0.9% NaCl), where the composition is sterile and is free of detectable pyrogens and/or other toxins.

[0538] Other examples of formulations suitable for parenteral administration include isotonic sterile injection solutions, anti-oxidants, bacteriostats, and solutes that render the formulation isotonic with the blood of the intended recipient, suspending agents, solubilizers, thickening agents, stabilizers, and preservatives. For example, a subject pharmaceutical composition can be present in a container, e.g., a sterile container, such as a syringe. The formulations can be presented in unit-dose or multi-dose sealed containers, such as ampules and vials, and can be stored in a freeze-dried (lyophilized) condition requiring only the addition of the sterile liquid excipient, for example, water, for injections, immediately prior to use. Extemporaneous injection solutions and suspensions can be prepared from sterile powders, granules, and tablets.

[0539] The concentration of a TMAPP of the present disclosure in a formulation can vary widely (e.g., from less than about 0.1%, usually at or at least about 2% to as much as 20% to 50% or more by weight) and will usually be selected primarily based on fluid volumes, viscosities, and patient-based factors in accordance with the particular mode of administration selected and the patient's needs.

[0540] The present disclosure provides a container comprising a composition of the present disclosure, e.g., a liquid composition. The container can be, e.g., a syringe, an ampoule, and the like. In some cases, the container is sterile. In some cases, both the container and the composition are sterile.

### Compositions Comprising a Nucleic Acid or a Recombinant Expression Vector

[0541] The present disclosure provides compositions, e.g., pharmaceutical compositions, comprising a nucleic acid or a recombinant expression vector of the present disclosure. A wide variety of pharmaceutically acceptable excipients is known in the art and need not be discussed in detail herein. Pharmaceutically acceptable excipients have been amply described in a variety of publications, including, for example, A. Gennaro (2000) “Remington: The Science and Practice of Pharmacy”, 20th edition, Lippincott, Williams, & Wilkins; Pharmaceutical Dosage Forms and Drug Delivery Systems (1999) H. C. Ansel et al., eds 7^{th} ed., Lippincott, Williams, & Wilkins; and Handbook of Pharmaceutical Excipients (2000) A. H. Kibbe et al., eds., 3^{rd} ed. Amer. Pharmaceutical Assoc.

[0542] A composition of the present disclosure can include: a) one or more nucleic acids or one or more recombinant expression vectors comprising nucleotide sequences encoding a TMAPP of the present disclosure; and b) one or more of: a buffer, a surfactant, an antioxidant, a hydrophilic polymer, a dextrin, a chelating agent, a suspending agent, a solubilizer, a thickening agent, a stabilizer, a bacteriostatic agent, a wetting agent, and a preservative. Suitable buffers include, but are not limited to, (such as N,N-bis(2-hydroxyethyl)-2-aminoethanesulfonic acid (BES), bis(2-hydroxyethyl)amino-tris(hydroxymethyl)methane (BIS-Tris), N-(2-hydroxyethyl)piperazine-N′3-propanesulfonic acid (EPPS or HEPPS), glycylglycine, N-2-hydroxyehtylpiperazine-N′-2-ethanesulfonic acid (HEPES), 3-(N-morpholino)propane sulfonic acid (MOPS), piperazine-N,N′-bis(2-ethane-sulfonic acid) (PIPES), sodium bicarbonate, 3-(N-tris(hydroxymethyl)-methyl-amino)-2-hydroxy-propanesulfonic acid) TAPSO, (N-tris(hydroxymethyl)methyl-2-aminoethanesulfonic acid (TES), N-tris(hydroxymethyl)methyl-glycine (Tricine), tris(hydroxymethyl)-aminomethane (Tris), etc.). Suitable salts include, e.g., NaCl, MgCl₂, KCl, MgSO₄, etc.

[0543] A pharmaceutical formulation of the present disclosure can include a nucleic acid or recombinant expression vector of the present disclosure in an amount of from about 0.001% to about 90% (w/w). In the description of formulations, below, “subject nucleic acid or recombinant expression vector” will be understood to include a nucleic acid or recombinant expression vector of the present disclosure. For example, in some cases, a subject formulation comprises a nucleic acid or recombinant expression vector of the present disclosure.

[0544] A subject nucleic acid or recombinant expression vector can be admixed, encapsulated, conjugated or otherwise associated with other compounds or mixtures of compounds; such compounds can include, e.g., liposomes or receptor-targeted molecules. A subject nucleic acid or recombinant expression vector can be combined in a formulation with one or more components that assist in uptake, distribution and/or absorption.

[0545] A subject nucleic acid or recombinant expression vector composition can be formulated into any of many possible dosage forms such as, but not limited to, tablets, capsules, gel capsules, liquid syrups, soft gels, suppositories, and enemas. A subject nucleic acid or recombinant expression vector composition can also be formulated as suspensions in aqueous, non-aqueous or mixed media. Aqueous suspensions may further contain substances which increase the viscosity of the suspension including, for example, sodium carboxymethylcellulose, sorbitol and/or dextran. The suspension may also contain stabilizers.

[0546] A formulation comprising a subject nucleic acid or recombinant expression vector can be a liposomal formulation. As used herein, the term “liposome” means a vesicle composed of amphiphilic lipids arranged in a spherical bilayer or bilayers. Liposomes are unilamellar or multilamellar vesicles which have a membrane formed from a lipophilic material and an aqueous interior that contains the composition to be delivered. Cationic liposomes are positively charged liposomes that can interact with negatively charged DNA molecules to form a stable complex. Liposomes that are pH sensitive or negatively charged are believed to entrap DNA rather than complex with it. Both cationic and noncationic liposomes can be used to deliver a subject nucleic acid or recombinant expression vector.

[0547] Liposomes also include “sterically stabilized” liposomes, a term which, as used herein, refers to liposomes comprising one or more specialized lipids that, when incorporated into liposomes, result in enhanced circulation lifetimes relative to liposomes lacking such specialized lipids. Examples of sterically stabilized liposomes are those in which part of the vesicle-forming lipid portion of the liposome comprises one or more glycolipids or is derivatized with one or more hydrophilic polymers, such as a polyethylene glycol (PEG) moiety. Liposomes and their uses are further described in U.S. Pat. No. 6,287,860, which is incorporated herein by reference in its entirety.

[0548] The formulations and compositions of the present disclosure may also include surfactants. The use of surfactants in drug products, formulations and in emulsions is well known in the art. Surfactants and their uses are further described in U.S. Pat. No. 6,287,860.

[0549] In one embodiment, various penetration enhancers are included, to effect the efficient delivery of nucleic acids. In addition to aiding the diffusion of non-lipophilic drugs across cell membranes, penetration enhancers also enhance the permeability of lipophilic drugs. Penetration enhancers may be classified as belonging to one of five broad categories, i.e., surfactants, fatty acids, bile salts, chelating agents, and non-chelating non-surfactants. Penetration enhancers and their uses are further described in U.S. Pat. No. 6,287,860, which is incorporated herein by reference in its entirety.

[0550] Compositions and formulations for oral administration include powders or granules, microparticulates, nanoparticulates, suspensions or solutions in water or non-aqueous media, capsules, gel capsules, sachets, tablets, or minitablets. Thickeners, flavoring agents, diluents, emulsifiers, dispersing aids or binders may be desirable. Suitable oral formulations include those in which a subject antisense nucleic acid is administered in conjunction with one or more penetration enhancers surfactants and chelators. Suitable surfactants include, but are not limited to, fatty acids and/or esters or salts thereof, bile acids and/or salts thereof. Suitable bile acids/salts and fatty acids and their uses are further described in U.S. Pat. No. 6,287,860. Also suitable are combinations of penetration enhancers, for example, fatty acids/salts in combination with bile acids/salts. An exemplary suitable combination is the sodium salt of lauric acid, capric acid, and UDCA. Further penetration enhancers include, but are not limited to, polyoxyethylene-9-lauryl ether, and polyoxyethylene-20-cetyl ether. Suitable penetration enhancers also include propylene glycol, dimethylsulfoxide, triethanolamine, N,N-dimethylacetamide, N,N-dimethylformamide, 2-pyrrolidone and derivatives thereof, tetrahydrofurfuryl alcohol, and AZONE™.

### Methods

[0551] A TMAPP of the present disclosure is useful for modulating an activity of a T cell. Thus, the present disclosure provides methods of modulating an activity of a T cell, the methods generally involving contacting a target T cell with a TMAPP of the present disclosure.

[0552] An APP of the present disclosure is useful for various research, therapeutic, and diagnostic purposes. For example, an APP of the present disclosure can be used to label, directly or indirectly, an antigen-specific T cell.

### Methods of Modulating T Cell Activity

[0553] The present disclosure provides a method of selectively modulating the activity of an epitope-specific T cell, the method comprising contacting the T cell with a TMAPP of the present disclosure, where contacting the T cell with a TMAPP of the present disclosure selectively modulates the activity of the epitope-specific T cell. In some cases, the contacting occurs in vitro. In some cases, the contacting occurs in vivo. In some cases, the contacting occurs ex vivo.

[0554] In some cases, a TMAPP of the present disclosure reduces activity of an autoreactive T cell and/or an autoreactive B cell. In some cases, a TMAPP of the present disclosure increases the number and/or activity of a regulator T cell (Treg), resulting in reduced activity of an autoreactive T cell and/or an autoreactive B cell.

[0555] In some cases, the T cell being contacted with a TMAPP of the present disclosure is a regulatory T cell (Treg). Tregs are CD4⁺, FOXP3⁺, and CD25⁺. Tregs can suppress autoreactive T cells. In some cases, a method of the present disclosure activates Tregs, thereby reducing autoreactive T cell activity.

[0556] The present disclosure provides a method of increasing proliferation of Tregs, the method comprising contacting Tregs with a TMAPP of the present disclosure, where the contacting increases proliferation of Tregs. The present disclosure provides a method of increasing the number of Tregs in an individual, the method comprising administering to the individual a TMAPP of the present disclosure, where the administering results in an increase in the number of Tregs in the individual. For example, the number of Tregs can be increased by at least 5%, at least 10%, at least 15%, at least 20%, at least 25%, at least 30%, at least 40%, at least 50%, at least 60%, at least 70%, at least 80%, at least 90%, at least 2-fold, at least 2.5-fold, at least 5-fold, at least 10-fold, or more than 10-fold.

[0557] In some cases, the cell being contacted is a helper T cell, where contacting the helper T cell with a TMAPP of the present disclosure results in activation of the helper T cell. In some cases, activation of the helper T cell results in an increase in the activity and/or number of CD8⁺ cytotoxic T cells, e.g., CD8⁺ cytotoxic T cells that target and kill an autoreactive cell.

### Methods of Detecting an Antigen-Specific T Cell

[0558] The present disclosure provides a method of detecting an antigen-specific T-cell. The methods comprise contacting a T cell with an APP of the present disclosure; and detecting binding of the APP to the T cell.

[0559] The present disclosure provides a method of detecting an antigen-specific T cell, the method comprising contacting a T cell with an APP of the present disclosure, wherein binding of the APP to the T cell indicates that the T cell is specific for the epitope present in the APP.

[0560] In some cases, the APP comprises a detectable label. Suitable detectable labels include, but are not limited to, a radioisotope, a fluorescent polypeptide, or an enzyme that generates a fluorescent product, and an enzyme that generates a colored product. Where the APP comprises a detectable label, binding of the APP to the T cell is detected by detecting the detectable label.

[0561] Suitable fluorescent proteins include, but are not limited to, green fluorescent protein (GFP) or variants thereof, blue fluorescent variant of GFP (BFP), cyan fluorescent variant of GFP (CFP), yellow fluorescent variant of GFP (YFP), enhanced GFP (EGFP), enhanced CFP (ECFP), enhanced YFP (EYFP), GFPS65T, Emerald, Topaz (TYFP), Venus, Citrine, mCitrine, GFPuv, destabilised EGFP (dEGFP), destabilised ECFP (dECFP), destabilised EYFP (dEYFP), mCFPm, Cerulean, T-Sapphire, CyPet, YPet, mKO, HcRed, t-HcRed, DsRed, DsRed2, DsRed-monomer, J-Red, dimer2, t-dimer2(12), mRFP1, pocilloporin, Renilla GFP, Monster GFP, paGFP, Kaede protein and kindling protein, Phycobiliproteins and Phycobiliprotein conjugates including B-Phycoerythrin, R-Phycoerythrin and Allophycocyanin. Other examples of fluorescent proteins include mHoneydew, mBanana, mOrange, dTomato, tdTomato, mTangerine, mStrawberry, mCherry, mGrape1, mRaspberry, mGrape2, mPlum (Shaner et al. (2005) Nat. Methods 2:905-909), and the like. Any of a variety of fluorescent and colored proteins from Anthozoan species, as described in, e.g., Matz et al. (1999) Nature Biotechnol. 17:969-973, is suitable for use.

[0562] Suitable enzymes include, but are not limited to, horse radish peroxidase (HRP), alkaline phosphatase (AP), beta-galactosidase (GAL), glucose-6-phosphate dehydrogenase, beta-N-acetylglucosaminidase, β-glucuronidase, invertase, Xanthine Oxidase, firefly luciferase, glucose oxidase (GO), and the like.

[0563] In some cases, binding of the APP to the T cell is detected using a detectably labeled antibody specific for the APP. An antibody specific for the APP can comprise a detectable label such as a radioisotope, a fluorescent polypeptide, or an enzyme that generates a fluorescent product, or an enzyme that generates a colored product.

[0564] In some cases, the T cell being detected is present in a sample comprising a plurality of T cells. For example, a T cell being detected can be present in a sample comprising from 10 to 10⁹ T cells, e.g., from 10 to 10², from 10² to 10⁴, from 10⁴ to 10⁶, from 10⁶ to 10⁷, from 10⁷ to 10⁸, or from 10⁸ to 10⁹, or more than 10⁹, T cells.

### Treatment Methods

[0565] The present disclosure provides treatment methods, the methods comprising administering to the individual an amount of a TMAPP of the present disclosure, or one or more nucleic acids or expression vectors encoding the TMAPP, effective to selectively modulate the activity of an epitope-specific T cell in an individual and to treat the individual. In some cases, a treatment method of the present disclosure comprises administering to an individual in need thereof one or more recombinant expression vectors comprising nucleotide sequences encoding a TMAPP of the present disclosure. In some cases, a treatment method of the present disclosure comprises administering to an individual in need thereof one or more mRNA molecules comprising nucleotide sequences encoding a TMAPP of the present disclosure. In some cases, a treatment method of the present disclosure comprises administering to an individual in need thereof a TMAPP of the present disclosure. Conditions that can be treated include autoimmune disorders such as type 1 diabetes and celiac disease.

[0566] The present disclosure provides a method of selectively modulating the activity of an epitope-specific T cell in an individual, the method comprising administering to the individual an effective amount of a TMAPP of the present disclosure, or one or more nucleic acids (e.g., expression vectors; mRNA; etc.) comprising nucleotide sequences encoding the TMAPP, where the TMAPP selectively modulates the activity of the epitope-specific T cell in the individual. Selectively modulating the activity of an epitope-specific T cell can treat a disease or disorder in the individual. Thus, the present disclosure provides a treatment method comprising administering to an individual in need thereof an effective amount of a TMAPP of the present disclosure (e.g., a multimeric TMAPP of the present disclosure; or a single-chain TMAPP of the present disclosure). In some cases, the disease or disorder is an autoimmune disease or disorder. In some cases, the disease or disorder is T1D. In some cases, the disease or disorder is celiac disease.

[0567] In some cases, the immunomodulatory polypeptide is an inhibitory polypeptide, and a T TMAPP of the present disclosure inhibits activity of the epitope-specific T cell. In some cases, the epitope is a self-epitope, and a TMAPP of the present disclosure selectively inhibits the activity of a T cell specific for the self-epitope.

[0568] The present disclosure provides a method of treating an autoimmune disorder (e.g., T1D or celiac disease) in an individual, the method comprising administering to the individual an effective amount of a TMAPP of the present disclosure, or one or more nucleic acids comprising nucleotide sequences encoding the TMAPP, where the TMAPP (e.g., a multimeric TMAPP of the present disclosure; or a single-chain TMAPP of the present disclosure) comprises a T-cell epitope that is a self epitope, and where the TMAPP comprises an inhibitory immunomodulatory polypeptide. In some cases, an “effective amount” of a TMAPP of the present disclosure is an amount that, when administered in one or more doses to an individual in need thereof, reduces the number of self-reactive CD4⁺ and/or CD8⁺ T cells by at least 10%, at least 15%, at least 20%, at least 25%, at least 30%, at least 40%, at least 50%, at least 60%, at least 70%, at least 80%, at least 90%, or at least 95%, compared to number of self-reactive T cells in the individual before administration of the TMAPP, or in the absence of administration with the TMAPP. In some cases, an “effective amount” of a TMAPP of the present disclosure is an amount that, when administered in one or more doses to an individual in need thereof, reduces production of Th2 cytokines in the individual. In some cases, an “effective amount” of a TMAPP of the present disclosure is an amount that, when administered in one or more doses to an individual in need thereof, ameliorates one or more symptoms associated with an autoimmune disease in the individual. In some instances, the TMAPP reduces the number of CD4⁺ self-reactive T cells, which in turn leads to a reduction in CD8⁺ self-reactive T cells. In some instances, the TMAPP increases the number of CD4⁺ Tregs, which in turn reduces the number of CD4⁺ self-reactive T cells and/or CD8⁺ T self-reactive T cells.

[0569] As noted above, in some cases, in carrying out a subject treatment method, a TMAPP of the present disclosure is administered to an individual in need thereof, as the polypeptide per se. In other instances, in carrying out a subject treatment method, one or more nucleic acids comprising nucleotide sequences encoding a TMAPP is/are administering to an individual in need thereof. Thus, in other instances, one or more nucleic acids of the present disclosure, e.g., one or more recombinant expression vectors of the present disclosure, is/are administered to an individual in need thereof.

### Formulations

[0570] Suitable formulations are described above, where suitable formulations include a pharmaceutically acceptable excipient. In some cases, a suitable formulation comprises: a) a TMAPP of the present disclosure; and b) a pharmaceutically acceptable excipient. In some cases, a suitable formulation comprises: a) a nucleic acid comprising a nucleotide sequence encoding a TMAPP of the present disclosure; and b) a pharmaceutically acceptable excipient; in some instances, the nucleic acid is an mRNA. In some cases, a suitable formulation comprises: a) a first nucleic acid comprising a nucleotide sequence encoding the first polypeptide of a TMAPP of the present disclosure; b) a second nucleic acid comprising a nucleotide sequence encoding the second polypeptide of a TMAPP of the present disclosure; and c) a pharmaceutically acceptable excipient. In some cases, a suitable formulation comprises: a) a recombinant expression vector comprising a nucleotide sequence encoding a TMAPP of the present disclosure; and b) a pharmaceutically acceptable excipient. In some cases, a suitable formulation comprises: a) a first recombinant expression vector comprising a nucleotide sequence encoding the first polypeptide of a TMAPP of the present disclosure; b) a second recombinant expression vector comprising a nucleotide sequence encoding the second polypeptide of a TMAPP of the present disclosure; and c) a pharmaceutically acceptable excipient.

[0571] Suitable pharmaceutically acceptable excipients are described above.

### Dosages

[0572] A suitable dosage can be determined by an attending physician or other qualified medical personnel, based on various clinical factors. As is well known in the medical arts, dosages for any one patient depend upon many factors, including the patient's size, body surface area, age, the particular polypeptide or nucleic acid to be administered, sex of the patient, time, and route of administration, general health, and other drugs being administered concurrently. A multimeric polypeptide or a single-chain polypeptide of the present disclosure (e.g., a multimeric TMAPP or a single-chain TMAPP) may be administered in amounts between 1 ng/kg body weight and 20 mg/kg body weight per dose, e.g. between 0.1 mg/kg body weight to 10 mg/kg body weight, e.g. between 0.5 mg/kg body weight to 5 mg/kg body weight; however, doses below or above this exemplary range are envisioned, especially considering the aforementioned factors. If the regimen is a continuous infusion, it can also be in the range of 1 μg to 10 mg per kilogram of body weight per minute. A TMAPP of the present disclosure can be administered in an amount of from about 1 mg/kg body weight to 50 mg/kg body weight, e.g., from about 1 mg/kg body weight to about 5 mg/kg body weight, from about 5 mg/kg body weight to about 10 mg/kg body weight, from about 10 mg/kg body weight to about 15 mg/kg body weight, from about 15 mg/kg body weight to about 20 mg/kg body weight, from about 20 mg/kg body weight to about 25 mg/kg body weight, from about 25 mg/kg body weight to about 30 mg/kg body weight, from about 30 mg/kg body weight to about 35 mg/kg body weight, from about 35 mg/kg body weight to about 40 mg/kg body weight, or from about 40 mg/kg body weight to about 50 mg/kg body weight.

[0573] In some cases, a suitable dose of a TMAPP of the present disclosure is from 0.01 μg to 100 g per kg of body weight, from 0.1 μg to 10 g per kg of body weight, from 1 μg to 1 g per kg of body weight, from 10 μg to 100 mg per kg of body weight, from 100 μg to 10 mg per kg of body weight, or from 100 μg to 1 mg per kg of body weight. Persons of ordinary skill in the art can easily estimate repetition rates for dosing based on measured residence times and concentrations of the administered agent in bodily fluids or tissues. Following successful treatment, it may be desirable to have the patient undergo maintenance therapy to prevent the recurrence of the disease state, wherein a multimeric polypeptide or a single-chain polypeptide of the present disclosure (e.g., a multimeric TMAPP or a single-chain TMAPP) is administered in maintenance doses, ranging from 0.01 μg to 100 g per kg of body weight, from 0.1 μg to 10 g per kg of body weight, from 1 μg to 1 g per kg of body weight, from 10 μg to 100 mg per kg of body weight, from 100 μg to 10 mg per kg of body weight, or from 100 μg to 1 mg per kg of body weight.

[0574] Those of skill will readily appreciate that dose levels can vary as a function of the specific multimeric polypeptide or single-chain polypeptide (multimeric TMAPP or single-chain TMAPP), the severity of the symptoms and the susceptibility of the subject to side effects. Preferred dosages for a given compound are readily determinable by those of skill in the art by a variety of means.

[0575] In some cases, multiple doses of a TMAPP of the present disclosure, a nucleic acid of the present disclosure, or a recombinant expression vector of the present disclosure are administered. The frequency of administration of a TMAPP of the present disclosure, a nucleic acid of the present disclosure, or a recombinant expression vector of the present disclosure can vary depending on any of a variety of factors, e.g., severity of the symptoms, etc. For example, in some cases, a TMAPP of the present disclosure, a nucleic acid of the present disclosure, or a recombinant expression vector of the present disclosure is administered once per month, twice per month, three times per month, every other week (qow), once per week (qw), twice per week (biw), three times per week (tiw), four times per week, five times per week, six times per week, every other day (qod), daily (qd), twice a day (qid), or three times a day (tid).

[0576] The duration of administration of a TMAPP of the present disclosure, a nucleic acid of the present disclosure, or a recombinant expression vector of the present disclosure, e.g., the period of time over which a TMAPP of the present disclosure, a nucleic acid of the present disclosure, or a recombinant expression vector of the present disclosure is administered, can vary, depending on any of a variety of factors, e.g., patient response, etc. For example, a TMAPP of the present disclosure, a nucleic acid of the present disclosure, or a recombinant expression vector of the present disclosure can be administered over a period of time ranging from about one day to about one week, from about two weeks to about four weeks, from about one month to about two months, from about two months to about four months, from about four months to about six months, from about six months to about eight months, from about eight months to about 1 year, from about 1 year to about 2 years, or from about 2 years to about 4 years, or more.

### Routes of Administration

[0577] An active agent (a TMAPP of the present disclosure, a nucleic acid of the present disclosure, or a recombinant expression vector of the present disclosure) is administered to an individual using any available method and route suitable for drug delivery, including in vivo and ex vivo methods, as well as systemic and localized routes of administration.

[0578] Conventional and pharmaceutically acceptable routes of administration include intratumoral, peritumoral, intramuscular, intratracheal, intralymphatic, intracranial, subcutaneous, intradermal, topical application, intravenous, intraarterial, rectal, nasal, oral, and other enteral and parenteral routes of administration. Routes of administration may be combined, if desired, or adjusted depending upon the TMAPP and/or the desired effect. A TMAPP of the present disclosure, or a nucleic acid or recombinant expression vector of the present disclosure, can be administered in a single dose or in multiple doses.

[0579] In some cases, a TMAPP of the present disclosure, a nucleic acid of the present disclosure, or a recombinant expression vector of the present disclosure is administered intravenously. In some cases, a TMAPP of the present disclosure, a nucleic acid of the present disclosure, or a recombinant expression vector of the present disclosure is administered intramuscularly. In some cases, a TMAPP of the present disclosure, a nucleic acid of the present disclosure, or a recombinant expression vector of the present disclosure is administered intralymphatically. In some cases, a TMAPP of the present disclosure, a nucleic acid of the present disclosure, or a recombinant expression vector of the present disclosure is administered locally. In some cases, a TMAPP of the present disclosure, a nucleic acid of the present disclosure, or a recombinant expression vector of the present disclosure is administered intratumorally. In some cases, a TMAPP of the present disclosure, a nucleic acid of the present disclosure, or a recombinant expression vector of the present disclosure is administered peritumorally. In some cases, a TMAPP of the present disclosure, a nucleic acid of the present disclosure, or a recombinant expression vector of the present disclosure is administered intracranially. In some cases, a TMAPP of the present disclosure, a nucleic acid of the present disclosure, or a recombinant expression vector of the present disclosure is administered subcutaneously.

[0580] In some cases, a TMAPP of the present disclosure is administered intravenously. In some cases, a TMAPP of the present disclosure is administered intramuscularly. In some cases, a TMAPP of the present disclosure is administered locally. In some cases, a TMAPP of the present disclosure is administered intratumorally. In some cases, a TMAPP of the present disclosure is administered peritumorally. In some cases, a TMAPP of the present disclosure is administered intracranially. In some cases, a TMAPP of the present disclosure is administered subcutaneously. In some cases, a TMAPP of the present disclosure is administered intralymphatically.

[0581] A TMAPP of the present disclosure, a nucleic acid of the present disclosure, or a recombinant expression vector of the present disclosure can be administered to a host using any available conventional methods and routes suitable for delivery of conventional drugs, including systemic or localized routes. In general, routes of administration contemplated for use in a method of the present disclosure include, but are not necessarily limited to, enteral, parenteral, and inhalational routes.

[0582] Parenteral routes of administration other than inhalation administration include, but are not necessarily limited to, topical, transdermal, subcutaneous, intramuscular, intraorbital, intracapsular, intraspinal, intrasternal, intratumoral, intralymphatic, peritumoral, and intravenous routes, i.e., any route of administration other than through the alimentary canal. Parenteral administration can be carried to effect systemic or local delivery of a TMAPP of the present disclosure, a nucleic acid of the present disclosure, or a recombinant expression vector of the present disclosure. Where systemic delivery is desired, administration typically involves invasive or systemically absorbed topical or mucosal administration of pharmaceutical preparations.

### Subjects Suitable for Treatment

[0583] Subjects suitable for treatment with a method of the present disclosure include individuals who have an autoimmune disease, including individuals who have been diagnosed as having an autoimmune disease, and individuals who have been treated for an autoimmune disease but who failed to respond to the treatment. Autoimmune diseases that can be treated with a method of the present disclosure include, but are not limited to, celiac disease and type I autoimmune diabetes (IDDM; or type 1 diabetes (T1D)). In some cases, the individual has celiac disease. In some cases, the individual has T1D. In some cases, the individual has both celiac disease and T1D.

### Methods of Selectively Delivering a Costimulatory Polypeptide

[0584] The present disclosure provides a method of delivering a costimulatory polypeptide (such as IL-2; a reduced-affinity variant of a naturally occurring costimulatory polypeptide such as an IL-2 variant disclosed herein; or other immunomodulatory polypeptide described herein) to a selected T cell or a selected T cell population, e.g., in a manner such that a TCR specific for a given epitope is targeted. The present disclosure provides a method of delivering a costimulatory polypeptide (such as IL-2; a reduced-affinity variant of a naturally occurring costimulatory polypeptide such as an IL-2 variant disclosed herein; or other immunomodulatory polypeptide described herein) selectively to a target T cell bearing a TCR specific for the epitope present in a TMAPP of the present disclosure. The method comprises contacting a population of T cells with a TMAPP of the present disclosure. The population of T cells can be a mixed population that comprises: i) the target T cell; and ii) non-target T cells that are not specific for the epitope (e.g., T cells that are specific for an epitope(s) other than the epitope to which the epitope-specific T cell binds). The epitope-specific T cell is specific for the epitope-presenting peptide present in the TMAPP, and binds to the peptide HLA complex or peptide MHC complex provided by the TMAPP. Contacting the population of T cells with the TMAPP delivers the costimulatory polypeptide (such as IL-2; a reduced-affinity variant of a naturally occurring costimulatory polypeptide such as an IL-2 variant disclosed herein; or other immunomodulatory polypeptide described herein) present in the TMAPP selectively to the T cell(s) that are specific for the epitope present in the TMAPP.

[0585] Thus, the present disclosure provides a method of delivering a costimulatory polypeptide (such as IL-2; a reduced-affinity variant of a naturally occurring costimulatory polypeptide such as an IL-2 variant disclosed herein; or other immunomodulatory polypeptide described herein) selectively to a target T cell, the method comprising contacting a mixed population of T cells with a TMAPP of the present disclosure. The mixed population of T cells comprises the target T cell and non-target T cells. The target T cell is specific for the epitope present within the TMAPP. Contacting the mixed population of T cells with a TMAPP of the present disclosure delivers the costimulatory polypeptide(s) present within the TMAPP to the target T cell.

[0586] For example, a TMAPP of the present disclosure is contacted with a population of T cells comprising: i) a target T cell(s) that is specific for the epitope present in the TMAPP; and ii) a non-target T cell(s), e.g., a T cell(s) that is specific for a second epitope(s) that is not the epitope present in the TMAPP. Contacting the population results in selective delivery of the costimulatory polypeptide(s) (e.g., naturally-occurring costimulatory polypeptide (e.g., naturally occurring IL-2) or reduced-affinity variant of a naturally occurring costimulatory polypeptide (e.g., an IL-2 variant disclosed herein)), which is present in the TMAPP, to the target T cell. Thus, e.g., less than 50%, less than 40%, less than 30%, less than 25%, less than 20%, less than 15%, less than 10%, less than 5%, or less than 4%, 3%, 2% or 1%, of the non-target T cells bind the TMAPP and, as a result, the costimulatory polypeptide (e.g., IL-2 or IL-2 variant) is not delivered to the non-target T cells.

[0587] In some cases, the population of T cells is in vitro. In some cases, the population of T cells is in vitro, and a biological response (e.g., T cell activation and/or expansion and/or phenotypic differentiation) of the target T cell population to the TMAPP of the present disclosure is elicited in the context of an in vitro culture. For example, a mixed population of T cells can be obtained from an individual, and can be contacted with the TMAPP in vitro. Such contacting can comprise single or multiple exposures of the population of T cells to a defined dose(s) and/or exposure schedule(s). In some cases, said contacting results in selectively binding/activating and/or expanding target T cells within the population of T cells, and results in generation of a population of activated and/or expanded target T cells. As an example, a mixed population of T cells can be peripheral blood mononuclear cells (PBMC). For example, PBMC from a patient can be obtained by standard blood drawing and PBMC enrichment techniques before being exposed to 0.1-1000 nM of a TMAPP of the present disclosure under standard lymphocyte culture conditions. At time points before, during, and after exposure of the mixed T cell population at a defined dose and schedule, the abundance of target T cells in the in vitro culture can be monitored by specific peptide-MHC multimers and/or phenotypic markers and/or functional activity (e.g. cytokine ELISpot assays). In some cases, upon achieving an optimal abundance and/or phenotype of antigen specific cells in vitro, all or a portion of the population of activated and/or expanded target T cells is administered to the individual (the individual from whom the mixed population of T cells was obtained).

[0588] In some cases, the population of T cells is in vitro. For example, a mixed population of T cells is obtained from an individual, and is contacted with a TMAPP of the present disclosure in vitro. Such contacting, which can comprise single or multiple exposures of the T cells to a defined dose(s) and/or exposure schedule(s) in the context of in vitro cell culture, can be used to determine whether the mixed population of T cells includes T cells that are specific for the epitope presented by the TMAPP. The presence of T cells that are specific for the epitope of the TMAPP can be determined by assaying a sample comprising a mixed population of T cells, which population of T cells comprises T cells that are not specific for the epitope (non-target T cells) and may comprise T cells that are specific for the epitope (target T cells). Known assays can be used to detect activation and/or proliferation of the target T cells, thereby providing an ex vivo assay that can determine whether a particular TMAPP possesses an epitope that binds to T cells present in the individual and thus whether the TMAPP has potential use as a therapeutic composition for that individual. Suitable known assays for detection of activation and/or proliferation of target T cells include, e.g., flow cytometric characterization of T cell phenotype and/or antigen specificity and/or proliferation. Such an assay to detect the presence of epitope-specific T cells, e.g., a companion diagnostic, can further include additional assays (e.g. effector cytokine ELISpot assays) and/or appropriate controls (e.g. antigen-specific and antigen-nonspecific multimeric peptide-HLA staining reagents) to determine whether the TMAPP is selectively binding/activating and/or expanding the target T cell. Thus, for example, the present disclosure provides a method of detecting, in a mixed population of T cells obtained from an individual, the presence of a target T cell that binds an epitope of interest, the method comprising: a) contacting in vitro the mixed population of T cells with a TMAPP of the present disclosure, wherein the multimeric polypeptide comprises the epitope of interest; and b) detecting activation and/or proliferation of T cells in response to said contacting, wherein activated and/or proliferated T cells indicates the presence of the target T cell. Alternatively, and/or in addition, if activation and/or expansion (proliferation) of the desired T cell population is obtained using the TMAPP, then all or a portion of the population of T cells comprising the activated/expanded T cells can be administered back to the individual as a therapy.

[0589] In some instances, the population of T cells is in vivo in an individual. In such instances, a method of the present disclosure for selectively delivering a costimulatory polypeptide (such as IL-2; a reduced-affinity variant of a naturally occurring costimulatory polypeptide such as an IL-2 variant disclosed herein; or other immunomodulatory polypeptide described herein) to an epitope-specific T cell comprises administering the TMAPP to the individual.

[0590] The epitope-specific T cell to which a costimulatory polypeptide (e.g., IL-2 or a reduced-affinity IL-2) is being selectively delivered is also referred to herein as a “target T cell.” In some cases, the target T cell is a regulatory T cell (Treg). In some cases, the Treg inhibits or suppresses activity of an autoreactive T cell.

[0591] The present disclosure provides a method of delivering an inhibitory costimulatory polypeptide (such as PD-L1; a reduced-affinity variant of a naturally occurring costimulatory polypeptide such as a PD-L1 variant disclosed herein; a TGF-β polypeptide; or a FasL polypeptide) to a selected T cell or a selected T cell population, e.g., in a manner such that a TCR specific for a given epitope is targeted. The present disclosure provides a method of delivering an inhibitory costimulatory polypeptide (such as PD-L1; a reduced-affinity variant of a naturally occurring costimulatory polypeptide such as a PD-L1 variant disclosed herein; a TGF-β polypeptide; or a FasL polypeptide) selectively to a target T cell bearing a TCR specific for the epitope present in a TMAPP of the present disclosure. The method comprises contacting a population of T cells with a TMAPP of the present disclosure. The population of T cells can be a mixed population that comprises: i) the target T cell; and ii) non-target T cells that are not specific for the epitope (e.g., T cells that are specific for an epitope(s) other than the epitope to which the epitope-specific T cell binds). The epitope-specific T cell is specific for the epitope-presenting peptide present in the TMAPP, and binds to the peptide HLA complex or peptide MHC complex provided by the TMAPP. Contacting the population of T cells with the TMAPP delivers the inhibitory costimulatory polypeptide (such as PD-L1; a reduced-affinity variant of a naturally occurring costimulatory polypeptide such as a PD-L1 variant disclosed herein; a TGF-β polypeptide; or a FasL polypeptide) present in the TMAPP selectively to the T cell(s) that are specific for the epitope present in the TMAPP.

[0592] Thus, the present disclosure provides a method of delivering an inhibitory costimulatory polypeptide (such as PD-L1; a reduced-affinity variant of a naturally occurring costimulatory polypeptide such as a PD-L1 variant disclosed herein; a TGF-β polypeptide; or a FasL polypeptide) selectively to a target T cell, the method comprising contacting a mixed population of T cells with a TMAPP of the present disclosure. The mixed population of T cells comprises the target T cell and non-target T cells. The target T cell is specific for the epitope present within the TMAPP. Contacting the mixed population of T cells with a TMAPP of the present disclosure delivers the costimulatory polypeptide(s) present within the TMAPP to the target T cell.

[0593] For example, a TMAPP of the present disclosure is contacted with a population of T cells comprising: i) a target T cell(s) that is specific for the epitope present in the TMAPP; and ii) a non-target T cell(s), e.g., a T cell(s) that is specific for a second epitope(s) that is not the epitope present in the TMAPP. Contacting the population results in selective delivery of an inhibitory costimulatory polypeptide(s) an inhibitory costimulatory polypeptide (such as PD-L1; a reduced-affinity variant of a naturally occurring costimulatory polypeptide such as a PD-L1 variant disclosed herein; a TGF-β polypeptide; or a FasL polypeptide), which is present in the TMAPP, to the target T cell. Thus, e.g., less than 50%, less than 40%, less than 30%, less than 25%, less than 20%, less than 15%, less than 10%, less than 5%, or less than 4%, 3%, 2% or 1%, of the non-target T cells bind the TMAPP and, as a result, the costimulatory polypeptide is not delivered to the non-target T cells.

[0594] In some cases, the population of T cells is in vitro. In some cases, the population of T cells is in vitro, and a biological response (e.g., T cell activation and/or expansion and/or phenotypic differentiation) of the target T cell population to the TMAPP of the present disclosure is elicited in the context of an in vitro culture. For example, a mixed population of T cells can be obtained from an individual, and can be contacted with the TMAPP in vitro. Such contacting can comprise single or multiple exposures of the population of T cells to a defined dose(s) and/or exposure schedule(s). In some cases, said contacting results in selectively binding/activating and/or expanding target T cells within the population of T cells, and results in generation of a population of activated and/or expanded target T cells. As an example, a mixed population of T cells can be peripheral blood mononuclear cells (PBMC). For example, PBMC from a patient can be obtained by standard blood drawing and PBMC enrichment techniques before being exposed to 0.1-1000 nM of a TMAPP of the present disclosure under standard lymphocyte culture conditions. At time points before, during, and after exposure of the mixed T cell population at a defined dose and schedule, the abundance of target T cells in the in vitro culture can be monitored by specific peptide-MHC multimers and/or phenotypic markers and/or functional activity (e.g. cytokine ELISpot assays). In some cases, upon achieving an optimal abundance and/or phenotype of antigen specific cells in vitro, all or a portion of the population of activated and/or expanded target T cells is administered to the individual (the individual from whom the mixed population of T cells was obtained).

[0595] In some cases, the population of T cells is in vitro. For example, a mixed population of T cells is obtained from an individual, and is contacted with a TMAPP of the present disclosure in vitro. Such contacting, which can comprise single or multiple exposures of the T cells to a defined dose(s) and/or exposure schedule(s) in the context of in vitro cell culture, can be used to determine whether the mixed population of T cells includes T cells that are specific for the epitope presented by the TMAPP. The presence of T cells that are specific for the epitope of the TMAPP can be determined by assaying a sample comprising a mixed population of T cells, which population of T cells comprises T cells that are not specific for the epitope (non-target T cells) and may comprise T cells that are specific for the epitope (target T cells). Known assays can be used to detect activation and/or proliferation of the target T cells, thereby providing an ex vivo assay that can determine whether a particular TMAPP possesses an epitope that binds to T cells present in the individual and thus whether the TMAPP has potential use as a therapeutic composition for that individual. Suitable known assays for detection of activation and/or proliferation of target T cells include, e.g., flow cytometric characterization of T cell phenotype and/or antigen specificity and/or proliferation. Such an assay to detect the presence of epitope-specific T cells, e.g., a companion diagnostic, can further include additional assays (e.g. effector cytokine ELISpot assays) and/or appropriate controls (e.g. antigen-specific and antigen-nonspecific multimeric peptide-HLA staining reagents) to determine whether the TMAPP is selectively binding/activating and/or expanding the target T cell. Thus, for example, the present disclosure provides a method of detecting, in a mixed population of T cells obtained from an individual, the presence of a target T cell that binds an epitope of interest, the method comprising: a) contacting in vitro the mixed population of T cells with a TMAPP of the present disclosure, wherein the multimeric polypeptide comprises the epitope of interest; and b) detecting activation and/or proliferation of T cells in response to said contacting, wherein activated and/or proliferated T cells indicates the presence of the target T cell. Alternatively, and/or in addition, if activation and/or expansion (proliferation) of the desired T cell population is obtained using the TMAPP, then all or a portion of the population of T cells comprising the activated/expanded T cells can be administered back to the individual as a therapy.

[0596] In some instances, the population of T cells is in vivo in an individual. In such instances, a method of the present disclosure for selectively delivering a inhibitory costimulatory polypeptide (such as PD-L1; a reduced-affinity variant of a naturally occurring costimulatory polypeptide such as a PD-L1 variant disclosed herein; a TGF-β polypeptide; or a FasL polypeptide) to an epitope-specific T cell comprises administering the TMAPP to the individual.

[0597] The epitope-specific T cell to which a inhibitory costimulatory polypeptide (such as PD-L1; a reduced-affinity variant of a naturally occurring costimulatory polypeptide such as a PD-L1 variant disclosed herein; a TGF-β polypeptide; or a FasL polypeptide) is being selectively delivered is also referred to herein as a “target T cell.” In some cases, the target T cell is a regulatory T cell (Treg). In some cases, the Treg inhibits or suppresses activity of an autoreactive T cell. In some cases, the target T cell is a CD4⁺ T cell. In some cases, the target T cell is a CD4⁺ T cell that is specific for an autoantigen.

### Examples of Non-Limiting Aspects of the Disclosure

[0598] Aspects, including embodiments, of the present subject matter described above may be beneficial alone or in combination, with one or more other aspects or embodiments.

### Aspects Set A

[0599] Without limiting the foregoing description, certain non-limiting aspects of the disclosure numbered 1-23 are provided below. As will be apparent to those of skill in the art upon reading this disclosure, each of the individually numbered aspects may be used or combined with any of the preceding or following individually numbered aspects. This is intended to provide support for all such combinations of aspects and is not limited to combinations of aspects explicitly provided below:

[0600] Aspect 1. A multimeric T-cell modulatory antigen-presenting polypeptide comprising: a) a first polypeptide comprising: i) a peptide that displays a celiac-associated or a Type 1 Diabetes-associated (T1D-associated) epitope capable of being bound by a T-cell receptor (TCR); ii) a first major histocompatibility complex (MHC) class II polypeptide; and b) a second polypeptide comprising: i) a second MHC Class II polypeptide; and wherein one or both polypeptides of the multimeric polypeptide comprises one or more immunomodulatory polypeptides, wherein the first and the second MHC class II polypeptides comprise: i) an MHC class II α chain polypeptide selected from a polypeptide having at least 60%, at least 70%, at least 80%, at least 90%, at least 95%, at least 98%, at least 99%, or 100%, amino acid sequence identity to a DRA*0101 polypeptide, a DQA1*05:01 polypeptide, and a DQA1*03:01 polypeptide; and ii) an MHC class II β chain polypeptide selected from a polypeptide having at least 60%, at least 70%, at least 80%, at least 90%, at least 95%, at least 98%, at least 99%, or 100%, amino acid sequence identity to a DRB1*04:01 polypeptide, a DRB1*03:01 polypeptide, a DRB1*04:02 polypeptide, a DRB1*04:05 polypeptide, a DQB1*02:01 polypeptide, and a DQB1*03:02 polypeptide; and wherein one or both polypeptides of the multimeric polypeptide optionally comprises an immunoglobulin (Ig) Fc polypeptide or a non-Ig scaffold.

[0601] Aspect 2. The multimeric T-cell modulatory antigen-presenting polypeptide of aspect 1, wherein:

[0602] a1) the first polypeptide comprises, in order from N-terminus to C-terminus:
[0603] i) the peptide epitope;
[0604] ii) an MHC Class II β1 polypeptide; and
[0605] iii) an MHC Class II β2 polypeptide; and

[0606] b1) the second polypeptide comprises, in order from N-terminus to C-terminus:
[0607] i) the one or more immunomodulatory polypeptides;
[0608] ii) an MHC Class II α1 polypeptide;
[0609] iii) an MHC Class II α2 polypeptide; and
[0610] iv) an Ig Fc polypeptide; or

[0611] a2) the first polypeptide comprises, in order from N-terminus to C-terminus:
[0612] i) the peptide epitope;
[0613] ii) an MHC Class II 1 polypeptide; and
[0614] iii) an MHC Class II 2 polypeptide; and

[0615] b2) the second polypeptide comprises, in order from N-terminus to C-terminus:
[0616] i) an MHC Class II α1 polypeptide;
[0617] ii) an MHC Class II α2 polypeptide;
[0618] iii) an Ig Fc polypeptide; and
[0619] iv) the one or more immunomodulatory polypeptides; or

[0620] a3) the first polypeptide comprises, in order from N-terminus to C-terminus:
[0621] i) the peptide epitope;
[0622] ii) an MHC Class II 1 polypeptide; and
[0623] iii) an MHC Class II 2 polypeptide; and

[0624] b3) the second polypeptide comprises, in order from N-terminus to C-terminus:
[0625] i) an MHC Class II α1 polypeptide;
[0626] ii) an MHC Class II α2 polypeptide;
[0627] iii) the one or more immunomodulatory polypeptides; and
[0628] iv) an Ig Fc polypeptide; or

[0629] a4) the first polypeptide comprises, in order from N-terminus to C-terminus:
[0630] i) an MHC Class II α1 polypeptide;
[0631] ii) an MHC Class II α2 polypeptide; and
[0632] iii) an Ig Fc polypeptide; and

[0633] b4) the second polypeptide comprises, in order from N-terminus to C-terminus:
[0634] i) the one or more immunomodulatory polypeptides;
[0635] ii) the peptide epitope;
[0636] iii) an MHC Class II 1 polypeptide; and
[0637] iv) an MHC Class II 2 polypeptide; or

[0638] a5) the first polypeptide comprises, in order from N-terminus to C-terminus:
[0639] i) an MHC Class II α1 polypeptide;
[0640] ii) an MHC Class II α2 polypeptide; and
[0641] iii) an Ig Fc polypeptide; and

[0642] b5) the second polypeptide comprises, in order from N-terminus to C-terminus:
[0643] i) the peptide epitope;
[0644] ii) an MHC Class II β1 polypeptide;
[0645] iii) an MHC Class II 2 polypeptide; and
[0646] iv) the one or more immunomodulatory polypeptides.

[0647] Aspect 3. The multimeric T-cell modulatory antigen-presenting polypeptide of aspect 1 or aspect 2, wherein: a) the MHC class II α1 polypeptide comprises an amino acid sequence having at least 60%, at least 70%, at least 80%, at least 90%, at least 95%, at least 98%, at least 99%, or 100%, amino acid sequence identity to a DRA1*01:01 polypeptide; and the MHC class II β1 polypeptide comprises an amino acid sequence having at least 60%, at least 70%, at least 80%, at least 90%, at least 95%, at least 98%, at least 99%, or 100%, amino acid sequence identity to a DRB1*04:01 polypeptide; or b) the MHC class II α1 polypeptide comprises an amino acid sequence having at least 60%, at least 70%, at least 80%, at least 90%, at least 95%, at least 98%, at least 99%, or 100%, amino acid sequence identity to a DQA1*0501 polypeptide; and the MHC class II β1 polypeptide comprises an amino acid sequence having at least 60%, at least 70%, at least 80%, at least 90%, at least 95%, at least 98%, at least 99%, or 100%, amino acid sequence identity to a DQB1*0201 polypeptide; or c) the MHC class II α1 polypeptide comprises an amino acid sequence having at least 60%, at least 70%, at least 80%, at least 90%, at least 95%, at least 98%, at least 99%, or 100%, amino acid sequence identity to a DQA1*0301 polypeptide; and the MHC class II β1 polypeptide comprises an amino acid sequence having at least 60%, at least 70%, at least 80%, at least 90%, at least 95%, at least 98%, at least 99%, or 100%, amino acid sequence identity to a DQB1*0302 polypeptide.

[0648] Aspect 4. The T-cell modulatory antigen-presenting polypeptide of any one of aspects 1-3, wherein the immunomodulatory polypeptide:

[0649] a) comprises the amino acid sequence of a naturally-occurring immunomodulatory polypeptide; or

[0650] b) is a variant immunomodulatory polypeptide that comprises an amino acid sequence having from 1 to 10 amino acid substitutions compared to the amino acid sequence of a naturally-occurring immunomodulatory polypeptide, wherein the variant immunomodulatory polypeptide has reduced affinity for a co-immunomodulatory polypeptide, compared to the affinity of the naturally-occurring immunomodulatory polypeptide for the co-immunomodulatory polypeptide.

[0651] Aspect 5. The T-cell modulatory antigen-presenting polypeptide of any one of aspects 1-4, wherein the immunomodulatory polypeptide is a PD-L1 polypeptide, a FasL polypeptide, a TGF-β polypeptide, or a CD80 polypeptide.

[0652] Aspect 6. The T-cell modulatory antigen-presenting polypeptide of any one of aspects 1-4, wherein the immunomodulatory polypeptide is a PD-L1 polypeptide.

[0653] Aspect 7. The T-cell modulatory antigen-presenting polypeptide of aspect 1, wherein the T1D-associated peptide or celiac disease-associated peptide has a length of from about 4 amino acids to about 25 amino acids (e.g., from about 4 amino acids to about 25 amino acids in length (e.g., 4, 5, 6, 7, 8, 9, or 10 amino acids in length; from about 10 amino acids to about 15 amino acids in length, from about 15 amino acids to about 20 amino acids in length; or from about 20 amino acids to about 25 amino acids in length).

[0654] Aspect 8. The T-cell modulatory antigen-presenting polypeptide any one of aspects 1-7, wherein the peptide is a T1D-associated peptide comprising the amino acid sequence SLQPLALEGSLQSRG (SEQ ID NO:78).

[0655] Aspect 9. The T-cell modulatory antigen-presenting polypeptide of any one of aspects 1-7, wherein the peptide is a celiac disease-associated peptide.

[0656] Aspect 10. The T-cell modulatory antigen-presenting polypeptide of aspect 1, wherein: i) the first polypeptide comprises the amino acid sequence of the 3003 polypeptide depicted in FIG. 40C; and ii) the first polypeptide comprises the amino acid sequence of the 2639 polypeptide depicted in FIG. 40B.

[0657] Aspect 11. The T-cell modulatory antigen-presenting polypeptide of aspect 1, wherein: i) the first polypeptide comprises the amino acid sequence of the 3004 polypeptide depicted in FIG. 40D; and ii) the first polypeptide comprises the amino acid sequence of the 2639 polypeptide depicted win FIG. 40B.

[0658] Aspect 12. The T-cell modulatory antigen-presenting polypeptide of aspect 1, wherein: i) the first polypeptide comprises the amino acid sequence of the 3005 polypeptide depicted in FIG. 40E; and ii) the first polypeptide comprises the amino acid sequence of the 2639 polypeptide depicted in FIG. 40B.

[0659] Aspect 13. The T-cell modulatory antigen-presenting polypeptide of aspect 1, wherein: i) the first polypeptide comprises the amino acid sequence of the 2932 polypeptide depicted in FIG. 40A; and ii) the first polypeptide comprises the amino acid sequence of the 3213 polypeptide depicted in FIG. 40F.

[0660] Aspect 14. The T-cell modulatory antigen-presenting polypeptide of aspect 1, wherein: i) the first polypeptide comprises the amino acid sequence of the 2932 polypeptide depicted in FIG. 40A; and ii) the first polypeptide comprises the amino acid sequence of the 3214 polypeptide depicted in FIG. 40G.

[0661] Aspect 15. A composition comprising: a) the T-cell modulatory antigen-presenting polypeptide of any one of aspects 1-14; and b) a pharmaceutically acceptable excipient.

[0662] Aspect 16. One or more nucleic acids comprising nucleotide sequences encoding the T-cell modulatory antigen-presenting polypeptide of any one of aspects 1-14.

[0663] Aspect 17. One or more expression vectors comprising the one or more nucleic acids of aspect 16.

[0664] Aspect 18. A host cell genetically modified with the one or more nucleic acids of aspect 16 or the one or more expression vectors of aspect 17.

[0665] Aspect 19. A method of reducing the number and/or activity of CD4⁺ T cells and/or CD8⁺ self-reactive T cells specific for a type 1 diabetes-associated epitope or a celiac disease-associated epitope in an individual, the method comprising contacting the CD4⁺ T cells with the T-cell modulatory antigen-presenting polypeptide of any one of aspects 1-14, wherein said contacting reduces the number and/or activity of the CD4⁺ T cells and/or CD8⁺ T cells.

[0666] Aspect 20. A method of reducing the number and/or activity of CD4⁺ T cells and/or CD8⁺ self-reactive T cells specific for a type 1 diabetes-associated epitope or a celiac disease-associated epitope in an individual, the method comprising contacting the CD4⁺ T cells with the T-cell modulatory antigen-presenting polypeptide of any one of aspects 1-14, wherein said contacting increases the number of CD4⁺ Treg cells, which in turn reduces the number and/or activity of the CD4⁺ T cells and/or CD8⁺ T cells.

[0667] Aspect 21. A method of treating type 1 diabetes or celiac disease in an individual, the method comprising administering to an individual in need thereof an effective amount of the T-cell modulatory antigen-presenting polypeptide of any one of aspects 1-14, wherein said administering treats the type 1 diabetes or celiac disease in the individual.

[0668] Aspect 22. The method of aspect 20, wherein the peptide epitope is T1D-associated epitope, and wherein said administering treats T1D in the individual.

[0669] Aspect 23. The method of aspect 20, wherein the peptide epitope is celiac disease-associated epitope, and wherein said administering treats celiac disease in the individual.

### Aspects Set B

[0670] Without limiting the foregoing description, certain non-limiting aspects of the disclosure numbered 1-65 are provided below. As will be apparent to those of skill in the art upon reading this disclosure, each of the individually numbered aspects may be used or combined with any of the preceding or following individually numbered aspects. This is intended to provide support for all such combinations of aspects and is not limited to combinations of aspects explicitly provided below:

[0671] Aspect 1. A multimeric T-cell modulatory antigen-presenting polypeptide comprising:

[0672] a) a first polypeptide comprising: i) a peptide-epitope that displays a celiac-associated or a Type 1 Diabetes-associated (T1D-associated) epitope capable of being bound by a T-cell receptor (TCR); ii) a first major histocompatibility complex (MHC) Class II polypeptide; and

[0673] b) a second polypeptide comprising: i) a second MHC Class II polypeptide; and wherein one or both polypeptides of the multimeric polypeptide comprises one or more immunomodulatory polypeptides, and wherein one or both polypeptides of the multimeric polypeptide optionally comprises an immunoglobulin (Ig) Fc polypeptide or a non-Ig scaffold.

[0674] Aspect 2. The multimeric T-cell modulatory antigen-presenting polypeptide of aspect 1, wherein:

[0675] a1) the first polypeptide comprises, in order from N-terminus to C-terminus: i) the peptide epitope; ii) an MHC Class II β1 polypeptide; and iii) an MHC Class II β2 polypeptide; and b1) the second polypeptide comprises, in order from N-terminus to C-terminus: i) the one or more immunomodulatory polypeptides; ii) an MHC Class II α1 polypeptide; iii) an MHC Class II α2 polypeptide; and iv) an Ig Fc polypeptide; or

[0676] a2) the first polypeptide comprises, in order from N-terminus to C-terminus: i) the peptide epitope; ii) an MHC Class II β1 polypeptide; and iii) an MHC Class II β2 polypeptide; and b2) the second polypeptide comprises, in order from N-terminus to C-terminus: i) an MHC Class II α1 polypeptide; ii) an MHC Class II α2 polypeptide; iii) an Ig Fc polypeptide; and iv) the one or more immunomodulatory polypeptides; or

[0677] a3) the first polypeptide comprises, in order from N-terminus to C-terminus: i) the peptide epitope; ii) an MHC Class II β1 polypeptide; and iii) an MHC Class II β2 polypeptide; and b3) the second polypeptide comprises, in order from N-terminus to C-terminus: i) an MHC Class II α1 polypeptide; ii) an MHC Class II α2 polypeptide; iii) the one or more immunomodulatory polypeptides; and iv) an Ig Fc polypeptide; or

[0678] a4) the first polypeptide comprises, in order from N-terminus to C-terminus: i) an MHC Class II α1 polypeptide; ii) an MHC Class II α2 polypeptide; and iii) an Ig Fc polypeptide; and b4) the second polypeptide comprises, in order from N-terminus to C-terminus: i) the one or more immunomodulatory polypeptides; ii) the peptide epitope; iii) an MHC Class II β1 polypeptide; and iv) an MHC Class II 2 polypeptide; or

[0679] a5) the first polypeptide comprises, in order from N-terminus to C-terminus: i) an MHC Class II α1 polypeptide; ii) an MHC Class II α2 polypeptide; and iii) an Ig Fc polypeptide; and b5) the second polypeptide comprises, in order from N-terminus to C-terminus: i) the peptide epitope; ii) an MHC Class II β1 polypeptide; iii) an MHC Class II β2 polypeptide; and iv) the one or more immunomodulatory polypeptides; or

[0680] a6) the first polypeptide comprises, in order from N-terminus to C-terminus: i) the one or more immunomodulatory polypeptides; ii) an MHC Class II α1 polypeptide; iii) an MHC Class II α2 polypeptide; iv) a first dimerization polypeptide comprising an Ig CH1 domain; and v) an Ig Fc polypeptide; and b6) the second polypeptide comprises, in order from N-terminus to C-terminus: i) the peptide epitope; ii) an MHC Class II β1 polypeptide; iii) an MHC Class II β2 polypeptide; and iv) a second dimerization polypeptide comprising an Ig kappa chain constant region; or

[0681] a7) the first polypeptide comprises, in order from N-terminus to C-terminus: i) an MHC Class II α1 polypeptide; ii) an MHC Class II α2 polypeptide; iii) the one or more immunomodulatory polypeptides; iv) a first dimerization polypeptide comprising an Ig CH1 domain; and v) an Ig Fc polypeptide; and b7) the second polypeptide comprises, in order from N-terminus to C-terminus: i) the peptide epitope; ii) an MHC Class II β1 polypeptide; iii) an MHC Class II β2 polypeptide; and iv) a second dimerization polypeptide comprising an Ig kappa chain constant region; or

[0682] a8) the first polypeptide comprises, in order from N-terminus to C-terminus: i) an MHC Class II α1 polypeptide; ii) an MHC Class II α2 polypeptide; iii) a first dimerization polypeptide comprising an Ig CH1 domain; iv) the one or more immunomodulatory polypeptides; and v) an Ig Fc polypeptide; and b8) the second polypeptide comprises, in order from N-terminus to C-terminus: i) the peptide epitope; ii) an MHC Class II β1 polypeptide; iii) an MHC Class II β2 polypeptide; and iv) a second dimerization polypeptide comprising an Ig kappa chain constant region; or

[0683] a9) the first polypeptide comprises, in order from N-terminus to C-terminus: i) an MHC Class II α1 polypeptide; ii) an MHC Class II α2 polypeptide; iii) a first dimerization polypeptide comprising an Ig CH1 domain; iv) an Ig Fc polypeptide; and v) the one or more immunomodulatory polypeptides; and b9) the second polypeptide comprises, in order from N-terminus to C-terminus: i) the peptide epitope; ii) an MHC Class II β1 polypeptide; iii) an MHC Class II β2 polypeptide; and iv) a second dimerization polypeptide comprising an Ig kappa chain constant region; or

[0684] a10) the first polypeptide comprises, in order from N-terminus to C-terminus: i) an MHC Class II α1 polypeptide; ii) an MHC Class II α2 polypeptide; iii) a first dimerization polypeptide comprising an Ig CH1 domain; iv) an Ig Fc polypeptide; and b10) the second polypeptide comprises, in order from N-terminus to C-terminus: i) the one or more immunomodulatory polypeptides; ii) the peptide epitope; iii) an MHC Class II β1 polypeptide; iv) an MHC Class II β2 polypeptide; and v) a second dimerization polypeptide comprising an Ig kappa chain constant region; or

[0685] a11) the first polypeptide comprises, in order from N-terminus to C-terminus: i) an MHC Class II α1 polypeptide; ii) an MHC Class II α2 polypeptide; iii) a first dimerization polypeptide comprising an Ig CH1 domain; iv) an Ig Fc polypeptide; and b11) the second polypeptide comprises, in order from N-terminus to C-terminus: i) the peptide epitope; ii) an MHC Class II β1 polypeptide; iii) an MHC Class II β2 polypeptide; iv) the one or more immunomodulatory polypeptides; and v) a second dimerization polypeptide comprising an Ig kappa chain constant region; or

[0686] a12) the first polypeptide comprises, in order from N-terminus to C-terminus: i) an MHC Class II α1 polypeptide; ii) an MHC Class II α2 polypeptide; iii) a first dimerization polypeptide comprising an Ig CH1 domain; iv) an Ig Fc polypeptide; and b12) the second polypeptide comprises, in order from N-terminus to C-terminus: i) the peptide epitope; ii) an MHC Class II β1 polypeptide; iii) an MHC Class II β2 polypeptide; iv) a second dimerization polypeptide comprising an Ig kappa chain constant region; and v) the one or more immunomodulatory polypeptides.

[0687] Aspect 3. A single-chain T-cell modulatory antigen-presenting polypeptide comprising:

[0688] i) a peptide epitope that displays a celiac-associated or Type 1 Diabetes-associated (T1D-associated) epitope capable of being bound by a T-cell receptor (TCR);

[0689] ii) a major histocompatibility complex (MHC) Class II α1 polypeptide;

[0690] iii) an MHC Class II α2 polypeptide;

[0691] iv) an MHC Class II β1 polypeptide;

[0692] v) an MHC Class II β2 polypeptide;

[0693] vi) one or more immunomodulatory polypeptides; and

[0694] vii) optionally an immunoglobulin (Ig) Fc polypeptide or a non-Ig scaffold.

[0695] Aspect 4. The single-chain T-cell modulatory antigen-presenting polypeptide of aspect 3, wherein the single-chain T-cell modulatory antigen-presenting polypeptide:

[0696] a) comprises, in order from N-terminus to C-terminus:

[0697] i) the peptide epitope;

[0698] ii) the MHC Class II β1 polypeptide;

[0699] iii) the MHC Class II α1 polypeptide;

[0700] iv) the MHC Class II α2 polypeptide;

[0701] v) the MHC Class II 2 polypeptide; and

[0702] vi) an Ig Fc polypeptide,

[0703] wherein the one or more immunomodulatory polypeptides is:

[0704] i) N-terminal to the peptide epitope; or

[0705] ii) between the MHC Class II β2 polypeptide and the Ig Fc polypeptide; or

[0706] iii) C-terminal to the Ig Fc polypeptide; or

[0707] b) comprises, in order from N-terminus to C-terminus:

[0708] i) the peptide epitope;

[0709] ii) the MHC Class II β1 polypeptide;

[0710] iii) the MHC Class II β2 polypeptide;

[0711] iv) the MHC Class II α1 polypeptide;

[0712] v) the MHC Class II α2 polypeptide; and

[0713] vi) an Ig Fc polypeptide;

[0714] wherein the one or more immunomodulatory polypeptides is:

[0715] i) N-terminal to the peptide epitope; or

[0716] ii) between the MHC Class II β2 polypeptide and the MHC Class II α1 polypeptide; or

[0717] iii) between the MHC Class II α2 polypeptide and the Ig Fc polypeptide; or

[0718] iv) C-terminal to the Ig Fc polypeptide; or

[0719] c) comprises, in order from N-terminus to C-terminus:

[0720] i) the peptide epitope;

[0721] ii) the MHC Class II α1 polypeptide;

[0722] iii) the MHC Class II α2 polypeptide;

[0723] iv) the MHC Class II β1 polypeptide;

[0724] v) the MHC Class II 2 polypeptide; and

[0725] vi) an Ig Fc polypeptide;

[0726] wherein the one or more immunomodulatory polypeptides is:

[0727] i) N-terminal to the peptide epitope; or

[0728] ii) between the MHC Class II α2 polypeptide and the MHC Class II 1 polypeptide; or

[0729] iii) between the MHC Class II β2 polypeptide and the Ig Fc polypeptide; or

[0730] iv) C-terminal to the Ig Fc polypeptide.

[0731] Aspect 5. The multimeric T-cell modulatory antigen-presenting polypeptide of aspect 1 or aspect 2, or the single-chain T-cell modulatory antigen-presenting polypeptide of aspect 3 or aspect 4, wherein:

[0732] a) the MHC Class II α1 polypeptide comprises an amino acid sequence having at least 95% amino acid sequence identity to an MHC Class II α1 polypeptide depicted in any one of FIGS. 6, 11, 13, 15, 17, and 18; and/or;

[0733] b) the MHC Class II α2 polypeptide comprises an amino acid sequence having at least 95% amino acid sequence identity to an MHC Class II α2 polypeptide depicted in any one of FIGS. 6, 11, 13, 15, 17, and 18; and/or

[0734] c) the MHC Class II β1 polypeptide comprises an amino acid sequence having at least 95% amino acid sequence identity to an MHC Class II β1 polypeptide depicted in any one of FIG. 7, FIG. 8, FIG. 9, FIG. 10, FIG. 12, FIG. 14, FIG. 16, FIG. 19A-19C, and FIG. 20A-20B; and/or

[0735] d) the MHC Class II β2 polypeptide comprises an amino acid sequence having at least 95% amino acid sequence identity to an MHC Class II β2 polypeptide depicted in any one of FIG. 7, FIG. 8, FIG. 9, FIG. 10, FIG. 12, FIG. 14, FIG. 16, FIG. 19A-19C, and FIG. 20A-20B.

[0736] Aspect 6. The T-cell modulatory antigen-presenting polypeptide of any one of aspects 1-5, wherein the immunomodulatory polypeptide: a) comprises the amino acid sequence of a naturally-occurring immunomodulatory polypeptide; or b) is a variant immunomodulatory polypeptide that comprises an amino acid sequence having from 1 to 10 amino acid substitutions compared to the amino acid sequence of a naturally-occurring immunomodulatory polypeptide, wherein the variant immunomodulatory polypeptide has reduced affinity for a co-immunomodulatory polypeptide, compared to the affinity of the naturally-occurring immunomodulatory polypeptide for the co-immunomodulatory polypeptide.

[0737] Aspect 7. The T-cell modulatory antigen-presenting polypeptide of any of aspects 1-4, wherein:

[0738] (i) the MHC Class II α1 polypeptide comprises an amino acid sequence from 80 to 110 amino acids in length (e.g., from 80 to 85, from 85 to 90, from 90 to 95, from 95 to 100, from 100 to 105, or from 105 to 110 amino acids) having at least 90% (e.g., 95%, 98%, 99% or 100%) amino acid sequence identity to an MHC Class II α1 polypeptide of an HLA-DRA, HLA-DMA, HLA-DOA, HLA-DPA1, HLA-DQA1, or HLA-DQA2 encoded polypeptide;

[0739] (ii) the MHC Class II α2 polypeptide comprises an amino acid sequence from 80 to 110 amino acids in length (e.g., from 80 to 85, from 85 to 90, from 90 to 95, from 95 to 100, from 100 to 105, or from 105 to 110 amino acids) having at least 90% (e.g., 95%, 98%, 99% or 100%) amino acid sequence identity to an MHC Class II α2 polypeptide of an HLA-DRA, HLA-DMA, HLA-DOA, HLA-DPA1, HLA-DQA1, or HLA-DQA2 encoded polypeptide;

[0740] (iii) the MHC Class II β1 polypeptide comprises an amino acid sequence from 80 to 110 amino acids in length (e.g., from 80 to 85, from 85 to 90, from 90 to 95, from 95 to 100, from 100 to 105, or from 105 to 110 amino acids) having at least 90% (e.g., 95%, 98%, 99% or 100%) amino acid sequence identity to an MHC Class II β1 polypeptide of an HLA-DRB1, HLA-DRB3, HLA-DRB4, HLA-DRB5, HLA-DMB, HLA-DOB, HLA-DPB1, HLA-DQB1, or HLA-DQB2 encoded polypeptide; and

[0741] (iv) the MHC Class II β2 polypeptide comprises an amino acid sequence from 80 to 110 amino acids in length (e.g., from 80 to 85, from 85 to 90, from 90 to 95, from 95 to 100, from 100 to 105, or from 105 to 110 amino acids) having at least 90% (e.g., 95%, 98%, 99% or 100%) amino acid sequence identity to an MHC Class 11 2 polypeptide of an HLA-DRB1, HLA-DRB3, HLA-DRB4, HLA-DRB5, HLA-DMB, HLA-DOB, HLA-DPB1, HLA-DQB1, or HLA-DQB2 encoded polypeptide.

[0742] Aspect 8. The T-cell modulatory antigen-presenting polypeptide of aspect 7, wherein the HLA-DRA, HLA-DMA, HLA-DOA, HLA-DPA1, HLA-DQA1, or HLA-DQA2 encoded polypeptide is an HLA-DQA1 encoded polypeptide.

[0743] Aspect 9. The T-cell modulatory antigen-presenting polypeptide of aspect 8, wherein the HLA-DQA1 encoded polypeptide is selected from the group consisting of: DQA1*02:01, DQA1*03:01, DQA1*0401, DQA1*05:01, and DQA1*0505.

[0744] Aspect 10. The T-cell modulatory antigen-presenting polypeptide of aspect 8, wherein the HLA-DQA1 encoded polypeptide is encoded by a DQA1*03 allele.

[0745] Aspect 11. The T-cell modulatory antigen-presenting polypeptide of aspect 10, wherein the HLA-DQA1 encoded polypeptide is DQA1*03:01.

[0746] Aspect 12. The T-cell modulatory antigen-presenting polypeptide of aspect 8, wherein the HLA-DQA1 encoded polypeptide is encoded by a DQA1*05 allele.

[0747] Aspect 13. The T-cell modulatory antigen-presenting polypeptide of aspect 12, wherein the HLA-DQA1 encoded polypeptide is either DQA1*05:01 or DQA1*0505.

[0748] Aspect 14. The T-cell modulatory antigen-presenting polypeptide of any one of aspects 7-13, wherein the HLA-DRB1, HLA-DRB3, HLA-DRB4, HLA-DRB5, HLA-DMB, HLA-DOB, HLA-DPB1, HLA-DQB1, or HLA-DQB2 encoded polypeptide is an HLA-DQB1 encoded polypeptide.

[0749] Aspect 15. The T-cell modulatory antigen-presenting polypeptide of aspects 14, wherein the HLA-DQB1 encoded polypeptide is selected from the group consisting of: DQB1*02:01, DQB1*02:02, DQB1*02:03, DQB1*03:01, DQB1*03:02, DQB1*03:03, DQB1*04:02, DQB1*05:01.

[0750] Aspect 16. The T-cell modulatory antigen-presenting polypeptide of aspect 14, wherein the HLA-DQB1 encoded polypeptide is encoded by a DQB1*02 allele.

[0751] Aspect 17. The T-cell modulatory antigen-presenting polypeptide of aspect 16, wherein the HLA-DQB1 encoded polypeptide is selected from the group consisting of DQB1*02:01, DQB1*02:02, and DQB1*02:03.

[0752] Aspect 18. The T-cell modulatory antigen-presenting polypeptide of aspect 14, wherein the HLA-DQB1 encoded polypeptide is encoded by a DQB1*03 allele.

[0753] Aspect 19. The T-cell modulatory antigen-presenting polypeptide of aspect 18, wherein the HLA-DQB1 encoded polypeptide is selected from the group consisting of DQB1*03:01, DQB1*03:02, and DQB1*03:03.

[0754] Aspect 20. The T-cell modulatory antigen-presenting polypeptide of any one of aspects 16-19, wherein the DQB1 P6 pocket comprises a Ser (Ser30P, see e.g. FIG. 19B Ser, 62), or the DQB1 β1 peptide sequence comprises the amino acid sequence LVSRSIYNR (SEQ ID NO:322).

[0755] Aspect 21. The T-cell modulatory antigen-presenting polypeptide of any one of aspects 16-20, wherein the DQB1 peptide comprises a lysine (Lys71β, see e.g. FIG. 19B, Lys 103), or the DQB1 β1 peptide sequence comprises the amino acid sequence ILERKRAAV (SEQ ID NO:323).

[0756] Aspect 22. The T-cell modulatory antigen-presenting polypeptide of any one of aspects 16-21, wherein the DQB1 peptide comprises a neutral amino acid residue at position 570.

[0757] Aspect 23. The T-cell modulatory antigen-presenting polypeptide of aspect 22, wherein the neutral residue is an alanine or serine at position 570 (see e.g. FIGS. 19B and 19C, Ala 89), or the DQB1 β1 peptide sequence comprises the amino acid sequence LGLPAAEYW (SEQ ID NO: 324) or LGLPSAEYW (SEQ ID NO: 325).

[0758] Aspect 24. The T-cell modulatory antigen-presenting polypeptide of any one of aspects 16-21, wherein the DQB1 peptide does not comprise an aspartic acid or glutamic acid residue at position 570.

[0759] Aspect 25. The T-cell modulatory antigen-presenting polypeptide of any one of aspects 16-19 wherein the DQB1 peptide comprises: Ser300 and Lys710; Ser300 and either an Ala 570 or Ser570; Lys710 and either an Ala 570 or Ser570; or Ser30P, Lys710, and either an Ala 570 or Ser570.

[0760] Aspect 26. The T-cell modulatory antigen-presenting polypeptide of aspect 14, wherein the HLA-DQB1 encoded polypeptide is DQB1*04:02 or DQB1*05:01.

[0761] Aspect 27. The T-cell modulatory antigen-presenting polypeptide of aspect 7, wherein the HLA-DRA, HLA-DMA, HLA-DOA, HLA-DPA1, HLA-DQA1, or HLA-DQA2 encoded polypeptide is an HLA-DRA encoded polypeptide.

[0762] Aspect 28. The T-cell modulatory antigen-presenting polypeptide of aspect 27, wherein the HLA-DQA1 encoded polypeptide is encoded by a DRA*01 allele.

[0763] Aspect 29. The T-cell modulatory antigen-presenting polypeptide of aspect 28, wherein the HLA-DQA1 encoded polypeptide is DRA1*01:01 OR DRA*01:02.

[0764] Aspect 30. The T-cell modulatory antigen-presenting polypeptide of any one of aspects 7, and 27-29, wherein the HLA-DRB1, HLA-DRB3, HLA-DRB4, HLA-DRB5, HLA-DMB, HLA-DOB, HLA-DPB1, HLA-DQB1, or HLA-DQB2 encoded polypeptide is an HLA-DRB1, HLA-DRB3, HLA-DRB4, or HLA-DRB5 encoded polypeptide.

[0765] Aspect 31. The T-cell modulatory antigen-presenting polypeptide of aspect 30, wherein the HLA-DRB1 encoded polypeptide is selected from the group consisting of: DRB1*02:01, DRB1*0301, DRB1*03:02, DRB1*04:01, DRB1*04:02, DRB1*04:05, DRB1*0801, HLA-DRB1*09:01, and HLA-DRB1*16:01.

[0766] Aspect 32. The T-cell modulatory antigen-presenting polypeptide of aspect 30, wherein the HLA-DRB1 encoded polypeptide is encoded by a HLA-DRB1*01 or HLA-DRB1*02 allele.

[0767] Aspect 33. The T-cell modulatory antigen-presenting polypeptide of aspect 32, wherein the HLA-DRB1 encoded polypeptide is HLA-DRB1*02:01.

[0768] Aspect 34. The T-cell modulatory antigen-presenting polypeptide of aspect 30, wherein the HLA-DRB1 encoded polypeptide is encoded by a DRB1*03 allele.

[0769] Aspect 35. The T-cell modulatory antigen-presenting polypeptide of aspect 34, wherein the HLA-DRB1 encoded polypeptide is selected from the group consisting HLA-DRB1 *03:01, HLA-DRB1 *03:02, and HLA-DRB1 1*03:03

[0770] Aspect 36. The T-cell modulatory antigen-presenting polypeptide of aspect 30, wherein the HLA-DRB1 encoded polypeptide is encoded by a HLA-DRB1*04 allele.

[0771] Aspect 37. The T-cell modulatory antigen-presenting polypeptide of aspect 34, wherein the HLA-DQB1 encoded polypeptide is selected from the group consisting of HLA-DRB1*04:01, HLA-DRB1*04:02, and HLA-DRB11*04:05.

[0772] Aspect 38. The T-cell modulatory antigen-presenting polypeptide of aspect 30, wherein the HLA-DRB1 encoded polypeptide is selected from the group consisting HLA-DRB1 *08:01, HLA-DRB1*09:01, and HLA-DRB1*16:01.

[0773] Aspect 39. The T-cell modulatory antigen-presenting polypeptide of aspect 7, wherein the HLA-DRA, HLA-DMA, HLA-DOA, HLA-DPA1, HLA-DQA1, or HLA-DQA2 encoded polypeptides are a single MHC Class II polypeptide having greater than 90% sequence identity to the amino acid sequence set forth in any one of FIG. 6 (DRA), FIG. 11 (DMA), FIG. 13 (DOA), FIG. 15 (DPA1), FIG. 17 (DQA1), and FIG. 18 (DQA2); and wherein the HLA-DRB1, HLA-DRB3, HLA-DRB4, HLA-DRB5, HLA-DMB, HLA-DOB, HLA-DPB1, HLA-DQB1, or HLA-DQB2 encoded polypeptides are a single MHC Class II polypeptide having greater than 90% sequence identity to the amino acid sequence set forth in any one of FIG. 7 (DRB1), FIG. 8 (DRB3), FIG. 9 (DRB4), FIG. 10 (DRB5), FIG. 12 (DMB), FIG. 14 (DOB), FIG. 16 (DPBA1), and FIGS. 19A-C(DQB1).

[0774] Aspect 40. The T-cell modulatory antigen-presenting polypeptide of aspect 7, wherein

[0775] (i) the HLA-DRA, HLA-DMA, HLA-DOA, HLA-DPA1, HLA-DQA1, or HLA-DQA2 encoded polypeptide is HLA-DRA1*01:01 and the HLA-DRB1, HLA-DRB3, HLA-DRB4, HLA-DRB5, HLA-DMB, HLA-DOB, HLA-DPB1, HLA-DQB1, or HLA-DQB2 encoded polypeptide is HLA-DRB1*04:01 (e.g., HLA-DR4.1-like); or

[0776] (ii) the HLA-DRA, HLA-DMA, HLA-DOA, HLA-DPA1, HLA-DQA1, or HLA-DQA2 encoded polypeptide is HLA-DRA1*01:01 and the HLA-DRB1, HLA-DRB3, HLA-DRB4, HLA-DRB5, HLA-DMB, HLA-DOB, HLA-DPB1, HLA-DQB1, or HLA-DQB2 encoded polypeptide is HLA-DRB1*04:05 (e.g., HLA-DR4.5-like).

[0777] Aspect 41. The T-cell modulatory antigen-presenting polypeptide of aspect 7, wherein:

[0778] (i) the HLA-DRA, HLA-DMA, HLA-DOA, HLA-DPA1, HLA-DQA1, or HLA-DQA2 encoded polypeptide is HLA-DQA1*01:01 and the HLA-DRB1, HLA-DRB3, HLA-DRB4, HLA-DRB5, HLA-DMB, HLA-DOB, HLA-DPB1, HLA-DQB1, or HLA-DQB2 encoded polypeptide is HLA-DQB1*0501;

[0779] (ii) the HLA-DRA, HLA-DMA, HLA-DOA, HLA-DPA1, HLA-DQA1, or HLA-DQA2 encoded polypeptide is HLA-DQA1*02:01 and the HLA-DRB1, HLA-DRB3, HLA-DRB4, HLA-DRB5, HLA-DMB, HLA-DOB, HLA-DPB1, HLA-DQB1, or HLA-DQB2 encoded polypeptide is HLA-DQB1*0202;

[0780] (iii) the HLA-DRA, HLA-DMA, HLA-DOA, HLA-DPA1, HLA-DQA1, or HLA-DQA2 encoded polypeptide is HLA-DQA1*0201 and the HLA-DRB1, HLA-DRB3, HLA-DRB4, HLA-DRB5, HLA-DMB, HLA-DOB, HLA-DPB1, HLA-DQB1, or HLA-DQB2 encoded polypeptide is HLA-DQB1*0301;

[0781] (iv) the HLA-DRA, HLA-DMA, HLA-DOA, HLA-DPA1, HLA-DQA1, or HLA-DQA2 encoded polypeptide is HLA-DQA1*0301 and the HLA-DRB1, HLA-DRB3, HLA-DRB4, HLA-DRB5, HLA-DMB, HLA-DOB, HLA-DPB1, HLA-DQB1, or HLA-DQB2 encoded polypeptide is HLA-DQB1*0302 (e.g., HLA-DQ8.1-like);

[0782] (v) the HLA-DRA, HLA-DMA, HLA-DOA, HLA-DPA1, HLA-DQA1, or HLA-DQA2 encoded polypeptide is HLA-DQA1*0301 and the HLA-DRB1, HLA-DRB3, HLA-DRB4, HLA-DRB5, HLA-DMB, HLA-DOB, HLA-DPB1, HLA-DQB1, or HLA-DQB2 encoded polypeptide is HLA-DQB1*0303;

[0783] (vi) the HLA-DRA, HLA-DMA, HLA-DOA, HLA-DPA1, HLA-DQA1, or HLA-DQA2 encoded polypeptide is HLA-DQA1*0401 and the HLA-DRB1, HLA-DRB3, HLA-DRB4, HLA-DRB5, HLA-DMB, HLA-DOB, HLA-DPB1, HLA-DQB1, or HLA-DQB2 encoded polypeptide is HLA-DQB1*0402;

[0784] (vii) the HLA-DRA, HLA-DMA, HLA-DOA, HLA-DPA1, HLA-DQA1, or HLA-DQA2 encoded polypeptide is HLA-DQA1*0501 and the HLA-DRB1, HLA-DRB3, HLA-DRB4, HLA-DRB5, HLA-DMB, HLA-DOB, HLA-DPB1, HLA-DQB1, or HLA-DQB2 encoded polypeptide is HLA-DQB1*0201 (e.g., HLA-DR2.5-like); or

[0785] (viii) the HLA-DRA, HLA-DMA, HLA-DOA, HLA-DPA1, HLA-DQA1, or HLA-DQA2 encoded polypeptide is HLA-DQA1*0505 and the HLA-DRB1, HLA-DRB3, HLA-DRB4, HLA-DRB5, HLA-DMB, HLA-DOB, HLA-DPB1, HLA-DQB1, or HLA-DQB2 encoded polypeptide is HLA-DQB1*0301.

[0786] Aspect 42. The T-cell modulatory antigen-presenting polypeptide of aspect 7, wherein the HLA-DRA, HLA-DMA, HLA-DOA, HLA-DPA1, HLA-DQA1, or HLA-DQA2 encoded polypeptide is HLA-DQA1*0501 and the HLA-DRB1, HLA-DRB3, HLA-DRB4, HLA-DRB5, HLA-DMB, HLA-DOB, HLA-DPB1, HLA-DQB1, or HLA-DQB2 encoded polypeptide is HLA-DQB1*0201 (e.g., HLA-DR2.5-like).

[0787] Aspect 43. The T-cell modulatory antigen-presenting polypeptide of aspect 7, wherein the HLA-DRA, HLA-DMA, HLA-DOA, HLA-DPA1, HLA-DQA1, or HLA-DQA2 encoded polypeptide is HLA-DQA1*0301 and the HLA-DRB1, HLA-DRB3, HLA-DRB4, HLA-DRB5, HLA-DMB, HLA-DOB, HLA-DPB1, HLA-DQB1, or HLA-DQB2 encoded polypeptide is HLA-DQB1*0302 (e.g., HLA-DQ8.1-like).

[0788] Aspect 44. The T-cell modulatory antigen-presenting polypeptide of any one of aspects 1-43, comprising two or more immunomodulatory polypeptides.

[0789] Aspect 45. The T-cell modulatory antigen-presenting polypeptide of any one of aspects 1-44, wherein the immunomodulatory polypeptide is a PD-L1 polypeptide, a FasL polypeptide, or a TGF-β polypeptide.

[0790] Aspect 46. The T-cell modulatory antigen-presenting polypeptide of any one of aspects 1-45, wherein the peptide epitope is a Type 1 Diabetes-associated (T1D-associated) self epitope-presenting peptide.

[0791] Aspect 47. The T-cell modulatory antigen-presenting polypeptide of aspect 46, wherein the self epitope-presenting peptide is a type 1 diabetes-associated peptide of from about 4 amino acids to about 25 amino acids in length (e.g., 4, 5, 6, 7, 8, 9, or 10 amino acids in length; from about 10 amino acids to about 15 amino acids in length, from about 15 amino acids to about 20 amino acids in length; or from about 20 amino acids to about 25 amino acids in length) from a protein selected from insulin, proinsulin, GAD65, GAF67, IA-2, HSP65, IGRP, IA1, and ZnT8.

[0792] Aspect 48. The T-cell modulatory antigen-presenting polypeptide of aspect 46, wherein the self epitope-presenting peptide comprises the amino acid sequence SLQPLALEGSLQSRG (SEQ ID NO: 78).

[0793] Aspect 49. The T-cell modulatory antigen-presenting polypeptide of any one of aspects 1-46, wherein the self epitope-presenting peptide comprises an amino acid sequence selected from: GAGSLQPLALEGSLQKR (SEQ ID NO: 72), GIVDQCCTSICSLYQ (SEQ ID NO: 73), GIVEQCCTSICSLYQ (SEQ ID NO: 74), or SFYLKNVQTQETRTLTQFHF (SEQ ID NO: 77).

[0794] Aspect 50. The T-cell modulatory antigen-presenting polypeptide of any one of aspects 1-45, wherein the peptide epitope is a celiac-associated epitope.

[0795] Aspect 51. The T-cell modulatory antigen-presenting polypeptide of aspect 50, wherein the celiac-associated epitope is a peptide epitope of a secalin, hordein, avenin, or glutenin.

[0796] Aspect 52. The T-cell modulatory antigen-presenting polypeptide of aspect 50, wherein the celiac-associated epitope is a peptide epitope of a gamma-gliadin.

[0797] Aspect 53. The T-cell modulatory antigen-presenting polypeptide of aspect 50, wherein the celiac-associated epitope is a peptide epitope selected from the group consisting of:

(SEQ ID NO: 80)
QPFPQPQ,
(SEQ ID NO: 81)
PFPQPQLPY,
(SEQ ID NO: 82)
PFPQPELPY,
(SEQ ID NO: 87)
ADAQLQPFPQPELPY,
(SEQ ID NO: 88)
ADALQPFPQPELPY,
(SEQ ID NO: 89)
ADAQPFPQPELPY,
(SEQ ID NO: 90)
ADAPFPQPELPY,
(SEQ ID NO: 91)
QLQIFPQPELPY,
(SEQ ID NO: 92)
QLQPFPEPELPY,
(SEQ ID NO: 93)
QLQPFPQPEEPY,
(SEQ ID NO: 94)
QLQIFPEPEEPY,
(SEQ ID NO: 95)
QPQPELPYPQPE,
(SEQ ID NO: 96)
ADAQPQPELPYPQPE,
(SEQ ID NO: 97)
ADAPQPELPYPQPE,
(SEQ ID NO: 98)
IQPELPYPQPE,
(SEQ ID NO: 99)
PQPELPEPQPE,
(SEQ ID NO: 100)
IQPELPEPQPE,,
(SEQ ID NO: 439)
QLQPFPQPCLP,
and
(SEQ ID NO: 102)
PQPELCYPQPE.

[0798] Aspect 54. A composition comprising: a) the T-cell modulatory antigen-presenting polypeptide of any one of aspects 1-53; and b) a pharmaceutically acceptable excipient.

[0799] Aspect 55. One or more nucleic acids comprising nucleotide sequences encoding the T-cell modulatory antigen-presenting polypeptide of any one of aspects 1-53.

[0800] Aspect 56. One or more expression vectors comprising the one or more nucleic acids of aspect 55.

[0801] Aspect 57. A host cell genetically modified with the one or more nucleic acids of aspect 55 or the one or more expression vectors of aspect 52.

[0802] Aspect 58. A method of selectively modulating the activity of an epitope-specific T cell, the method comprising contacting the T cell in vitro with the T-cell modulatory antigen-presenting polypeptide of any one of aspects 1-53, wherein said contacting selectively modulates the activity of the epitope-specific T cell.

[0803] Aspect 59. A treatment method, the method comprising administering to an individual in need thereof an effective amount of the T-cell modulatory antigen-presenting polypeptide of any one of aspects 1-53, wherein said administering treats the individual.

[0804] Aspect 60. The method of aspect 59, wherein the peptide epitope is a Type 1 Diabetes-associated (T1D-associated) epitope, and wherein said administering treats an autoimmune disorder in the individual.

[0805] Aspect 61. The method of aspect 59, wherein the peptide epitope is a celiac-associated epitope, and wherein said administering treats an autoimmune disorder in the individual.

[0806] Aspect 62. A method of delivering a costimulatory polypeptide selectively to target a T cell, the method comprising contacting a mixed population of T cells with a T-cell modulatory antigen-presenting polypeptide of any one of aspects 1-53, wherein the mixed population of T cells comprises the target T cell and non-target T cells, wherein the target T cell is specific for the epitope present within the T-cell modulatory antigen-presenting polypeptide, and wherein said contacting delivers the costimulatory polypeptide present within the T-cell modulatory antigen-presenting polypeptide to the target T cell.

[0807] Aspect 63. A method of detecting, in a mixed population of T cells obtained from an individual, the presence of a target T cell that binds an epitope of interest, the method comprising: a) contacting in vitro the mixed population of T cells with the T-cell modulatory antigen-presenting polypeptide of any one of aspects 1-53, wherein the T-cell modulatory antigen-presenting polypeptide comprises the epitope of interest; and b) detecting activation and/or proliferation of T cells in response to said contacting, wherein activated and/or proliferated T cells indicates the presence of the target T cell.

[0808] Aspect 64. A method of reducing the number and/or activity of pathogenic CD4⁺ and/or CD8⁺ self-reactive T cells specific for a type 1 diabetes-associated epitope or a celiac disease-associated epitope in an individual, the method comprising contacting the CD4⁺ T cells with the T-cell modulatory antigen-presenting polypeptide of any one of aspects 1-53, wherein said contacting reduces the number and/or activity of the pathogenic CD4⁺ and/or CD8⁺ T cells.

[0809] Aspect 65. A method of reducing the number and/or activity of CD4⁺ T cells and/or CD8⁺ self-reactive T cells specific for a pathogenic type 1 diabetes-associated epitope or a celiac disease-associated epitope in an individual, the method comprising contacting the CD4⁺ T cells with the T-cell modulatory antigen-presenting polypeptide of any one of aspects 1-53, wherein said contacting increases the number of CD4⁺ Treg cells, which in turn reduces the number and/or activity of the pathogenic CD4⁺ T cells and/or CD8⁺ T cells.

### EXAMPLES

[0810] The following examples are put forth so as to provide those of ordinary skill in the art with a complete disclosure and description of how to make and use the present invention, and are not intended to limit the scope of what the inventors regard as their invention nor are they intended to represent that the experiments below are all or the only experiments performed. Efforts have been made to ensure accuracy with respect to numbers used (e.g. amounts, temperature, etc.) but some experimental errors and deviations should be accounted for. Unless indicated otherwise, parts are parts by weight, molecular weight is weight average molecular weight, temperature is in degrees Celsius, and pressure is at or near atmospheric. Standard abbreviations may be used, e.g., bp, base pair(s); kb, kilobase(s); pl, picoliter(s); s or sec, second(s); min, minute(s); h or hr, hour(s); aa, amino acid(s); kb, kilobase(s); bp, base pair(s); nt, nucleotide(s); i.m., intramuscular(ly); i.p., intraperitoneal(ly); s.c., subcutaneous(ly); and the like.

### Example 1: Production of Antigen-Presenting Polypeptides

[0811] To optimize production of intact and stable MHC Class II antigen-presenting polypeptides, various structural arrangements of antigen-presenting polypeptides comprising MHC Class II polypeptides were synthesized, expressed, and purified using Protein A affinity chromatography.

[0812] The expression vector used was pD2610-v10: CMV(v10)-ORF, Mamm-ElecD (from ATUM). A nucleic acid comprising a nucleotide sequence encoding an antigen-presenting polypeptide(s) (e.g., an MHC Class II synTac) were inserted into the expression vector, to generate a recombinant expression vector encoding the antigen-presenting polypeptide(s) (e.g., an MHC Class II synTac). The recombinant expression vectors were introduced into ExpiCHO cells (Thermo; modified Chinese Hamster Ovary (CHO) cells; see, e.g., Jain et al. (2017) Protein Expr. Purif 134:38) using standard methods, generating genetically modified ExpiCHO cells. The genetically modified ExpiCHO cells were cultured in vitro in standard culture medium. The antigen-presenting polypeptide(s) (e.g., an MHC Class II synTac) were produced by the genetically modified ExpiCHO cells, and secreted into the culture medium. The antigen-presenting polypeptide(s) (e.g., an MHC Class II synTac) were purified from the culture medium using protein A affinity chromatography.

[0813] Briefly, a column pre-packed with 5 mL of mAb Select SuRe (GE Cat. #11003495) (protein A coupled to beads) was used. The flow rate used was 1.0 mL/minute. The culture medium was loaded onto the column at 1.0 mL/min. Before loading the culture medium, the column was equilibrated with 5 column volumes (CV) of equilibration buffer (1× phosphate-buffered saline (PBS), 20 mM EDTA). After the culture medium was loaded onto the column, the column was washed with 5 CV equilibration buffer, then washed with 10 CV wash buffer (1×PBS+863 mM NaCl (1 M total NaCl), 5 mM EDTA). Next, the column was washed with 5 CV equilibration buffer. Finally, the antigen-presenting polypeptide(s) (e.g., an MHC Class II synTac) bound to the column was eluted with elution buffer (50 mM glycine, pH 2.8, 500 mM NaCl); and 25-mL fractions were collected. Neutralization buffer (Tris-HCl, pH 9.0) was added to the collected fractions. Peak fractions were pooled, dialyzed against dialysis buffer (PBS+363 mM NaCl), then concentrated. The concentrated product was then subjected to size exclusion chromatography.

[0814] For the design of the MHC Class II synTacs, parameters varied included orientation of the MHC Class II alpha and beta chains, Fc placement, IL2 (MOD) placement, and length and content of the various linkers. The variants presented include single-chain as well as two-chain versions, each with the MHC Class II 3-1 domain linked N-terminal to the α-1 domain, and with 3-2 either C-terminal to α-2 or on a separate chain, as shown schematically in FIG. 24. Single-chain variants with and without the 3-2 domain or the IL2 fusion are shown, as well as two-chain versions with and without the bZIP dimerization domain. A two-chain version with the CMV peptide epitope instead of the hemagglutinin (HA) peptide epitope is shown, as well one version with the MHC Class II DR4 instead of the DR1 allele, with a proinsulin peptide.

[0815] Antigen-presenting polypeptides, with or without immunomodulatory polypeptides, were generated. Amino acid sequences of the antigen-presenting polypeptides, and nucleotide sequences encoding the polypeptides, are provided in FIG. 25-35. The polypeptides included single-chain polypeptides and multimeric polypeptides. The antigen-presenting polypeptides are as follows:

[0816] 1) 1599—This is a single-chain polypeptide comprising a variant IL-2 immunomodulatory polypeptide. The 1599 polypeptide also includes an HLA β2 polypeptide.

[0817] The 1599 polypeptide includes: i) an epitope (a hemagglutinin epitope); ii) HLA DRB1 β1; iii) HLA DRA α1 and a2; iv) HLA DRB1 β2; v) a variant IL-2 immunomodulatory polypeptide; and v) an IgG1 Fc.

[0818] 2) 1559—This is a single-chain polypeptide comprising an HLA β2 polypeptide. The 1559 polypeptide lacks an immunomodulatory polypeptide. The 1559 polypeptide includes: i) an epitope (a hemagglutinin (HA) epitope); ii) HLA DRB1 β1; iii) HLA DRA α1 and a2; iv) HLA DRB1 β2; and v) an IgG1 Fc.

[0819] 3) 1601—This is a single-chain polypeptide a variant IL-2 immunomodulatory polypeptide. The 1601 polypeptide lacks an HLA β2 polypeptide. The 1601 polypeptide includes: i) an epitope (a hemagglutinin epitope); ii) HLA DRB1 β1; iii) HLA DRA α1 and a2; iv) 2 copies of a variant IL-2 immunomodulatory polypeptide; and v) an IgG1 Fc polypeptide.

[0820] 4) 1452+1661—This is a multimeric antigen-presenting polypeptide. The epitope is a hemagglutinin epitope. It includes HLA DRB1 and DRA MHC Class II polypeptides. Both polypeptide chains include leucine zipper dimerizer peptides. The 1452 polypeptide includes an IgG1 Fc polypeptide.

[0821] 5) 1659+1664—This is a multimeric antigen-presenting polypeptide. It includes HLA DRB1 and DRA MHC Class II polypeptides. The epitope is a hemagglutinin epitope. The 1664 polypeptide includes 2 copies of a variant IL-2 immunomodulatory polypeptide. Both polypeptide chains lack leucine zipper dimerizer peptides. The 1659 polypeptide includes an IgG1 Fc polypeptide.

[0822] 6) 1637+1408—This is a multimeric antigen-presenting polypeptide. It includes HLA DRB1 and DRA MHC Class II polypeptides. The epitope is a CMV epitope. The 1408 polypeptide includes 2 copies of a variant IL-2 immunomodulatory polypeptide. Both chains include a leucine zipper (bZIP). The 1637 polypeptide includes an IgG1 Fc polypeptide.

[0823] 7) 1639+1640—This is a multimeric antigen-presenting polypeptide. It includes HLA DRB1-4 and DRA MHC Class II polypeptides. The epitope is a proinsulin epitope. Both chains include a leucine zipper (bZIP). The 1640 chain includes 2 copies of a variant IL-2 immunomodulatory polypeptide. The 1639 polypeptide includes an IgG1 Fc polypeptide.

[0824] Expression constructs comprising nucleotide sequences encoding the above-described polypeptides were introduced into a mammalian cell line. The produced polypeptides were loaded onto a reducing polyacrylamide gel. FIG. 4A-4B depict gel analysis (FIG. 4A) and expression levels (FIG. 4B) of various multimeric polypeptides described in FIG. 4C. As shown in FIG. 24, left panel, all polypeptides were produced in detectable amounts. The various constructs are depicted schematically in FIG. 24, right panel.

[0825] The single-chain version without the β-2 domain (and with IL2) demonstrated a robust expression level and an intact, homogeneous product upon Protein A purification (lane 3). The addition of the β-2 domain resulted in lower expression as well as de-stabilization of the molecule as indicated by a prominent breakdown product observed on the analytical gel (lane 1). Removal of the IL2 (while retaining the β-2) resulted in even lower expression, but with minimal breakdown product (lane 2).

[0826] With the β-2 domain on a separate chain, robust assembly was observed with incorporation of the bZIP leucine zipper dimerization domain (lane 5). Without the bZIP domain, modest expression and production of intact Fc-containing chain was observed; β-2 chain was incorporated (lane 4). Switching from the HA peptide to the CMV peptide in the two-chain bZIP model resulted in very robust expression of intact product (lane 6). Changing the β-2 allele from DR1 to DR4 along with the proinsulin peptide also resulted in robust expression of intact product (lane 7).

[0827] Production of the 1639+1640 multimeric antigen-presenting polypeptide is depicted in FIG. 39. A Coomassie-stained SDS-PAGE gel, under reducing and non-reducing conditions, following a single-step purification over a Protein A column, is shown. The gel shows the 69.5 kD 1639 chain and the 51.3 kD 1640 chain. Density scan of the gel indicated that the 1639+1630 multimeric polypeptide was produced at about 79 mg/L.

[0828] Therefore, intact, stable MHC Class II antigen-presenting polypeptides were synthesized, expressed and purified. These represented design models that incorporated either a single-chain or a two-chain system. Incorporation of both the β-2 domain and a dimerization domain resulted in robust expression using the two-chain system. The peptide chosen for binding to the MHC can provide stabilization. Further, intact, stable MHC Class II antigen-presenting polypeptides were generated with MHC Class II polypeptides of two different MHC alleles.

### Example 2: Further Antigen-Presenting Polypeptides

[0829] Constructs encoding a T-cell modulatory antigen-presenting multimeric polypeptide were generated, in which the first polypeptide included: i) an epitope; ii) an HLA β1 polypeptide; iii) an HLA α1 polypeptide; and iv) an HLA α2 polypeptide; and in which the second polypeptide included: i) two copies of a variant IL-2 immunomodulatory polypeptide; ii) an HLA β2 polypeptide; and iii) an Ig Fc polypeptide.

[0830] The multimeric polypeptide encoded by the constructs was produced, as described in Example 1; and the multimeric polypeptide so produced was analyzed. FIG. 36 schematically depicts the multimeric polypeptide.

[0831] 1) 1711+1705—This is a multimeric antigen-presenting polypeptide. It includes HLA DRB1 Class II polypeptides. The epitope is a hemagglutinin epitope. The 1711 polypeptide includes 2 copies of a variant IL-2 immunomodulatory polypeptide; an HLA DRB1 β2 polypeptide; and an IgG1 Fc polypeptide. The 1705 polypeptide includes the epitope-presenting peptide; an HLA DRB1 β1 polypeptide; an HLA DRA α1 polypeptide; and an HLA DRA α2 polypeptide.

[0832] 2) 1709+1705. This multimeric polypeptide is like 1711+1705, except that the 1709 polypeptide does not include any immunomodulatory polypeptides. Thus, the 1709 polypeptide includes only the HLA DRB1 β2 polypeptide and the IgG1 Fc polypeptide present in the 1711 polypeptide.

[0833] The expression results are provided in FIG. 36. The gel analysis indicates that intact polypeptides were generated. The expression levels were 10-15 mg/L. While the 35 kD band includes Fc breakdown product, Western blot analysis indicated that the 35 kD band also includes the peptide-β1-α1-α2 chain.

### Example 3: Effect of a TMAPP on Antigen-Specific CD4⁺ T Cell Proliferation

[0834] The effect of a TMAPP on antigen-specific CD4⁺ T cell proliferation was tested.

### Materials and Methods

### Treatment of PBMCs

[0835] Peripheral blood mononuclear cells (PBMCs) were obtained from an individual with T1D; the individual was designated Donor 3618. Donor 3618 is DR4⁺ and thus expresses HLA class II α chain DRA*0101 and β chain DRB1*0401.

[0836] The PBMCs were stimulated on Day 0 with: a) proinsulin 78-90 (K88S) peptide having the sequence QPLALEGSLQSRG (SEQ ID NO:437) alone; b) the proIns 78-90 (K88S) peptide and a TMAPP, where the TMAPP included: i) 2932+2639; ii) 3005+2639 (the 2639 polypeptide comprises the proIns 76-90 (K88S) peptide SLQPLALEGSLQSRG (SEQ ID NO:78)); or iii) 3005+2580; or c) no peptide and no TMAPP. Where the PBMCs were incubated with proinsulin (proIns) peptide, the peptide was present in a concentration of 10 g/ml. Where the PBMCs were incubated with TMAPP, the final concentration of TMAPP was 1 μM. The PBMCs were present at 1×10⁶ cells in a volume of 100 μl cell culture medium.

[0837] Amino acid sequences of 2932, 2639, and 3005 are provided in FIGS. 40A, 40B, and 40E, respectively. The TMAPP comprising 2932+2639 includes DR4 HLA a and β chains and the proIns 76-90 (K88S) peptide (SLQPLALEGSLQSRG; SEQ ID NO:78), but does not include an immunomodulatory polypeptide. The TMAPP comprising 3005+2639 includes DR4 HLA a and β chains, the proIns 76-90 (K88S) peptide, and PDL1. The TMAPP comprising 3005+2580 is similar to the 3005+2639 TMAPP, but includes a GAD65 555-567 F557I peptide (NFIRMVISNPAAT; SEQ ID NO:76) instead of the proIns 76-90 (K88S) peptide. The 3005+2580 TMAPP serves as a control for antigen specificity. The 2932+2639 TMAPP provides a “MOD-less” control, as it lacks an immunomodulatory polypeptide.

[0838] The 2580 chain has the following amino acid sequence:

(SEQ ID NO: 326)
NFIRMVISNPAATGGGGSGGGGSGGGGSGDTRPRFLEQVKHECHFFNGT
ERVRFLDRYFYHQEEYVRFDSDVGEYRAVTELGRPDAEYWNSQKDLLEQ
KRAAVDTYCRHNYGVGESFTVQRRVYPEVTVYPAKTQPLQHHNLLVCSV
NGFYPASIEVRWFRNGQEEKTGVVSTGLIQNGDWTFQTLVMLETVPRSG
EVYTCQVEHPSLTSPLTVEWRARSESAQSKM,

where the (G4S)₃ linker is in bold, the and the DRB1*0401 class II β chain is underlined.

[0839] On Day 3, 100 μl fresh cell culture medium containing 100 Units/ml recombinant human IL-2 (rhIL-2) was added. In this experimental context, IL-2 primarily promotes the differentiation and proliferation of effector T cells. On Days 5, 7, and 9, half of the cell culture medium was replaced with fresh cell culture medium containing 50 Units/ml hrIL-2.

[0840] On Day 10, the PBMCs were subjected to fluorescence activated cell sorting (FACS) analysis to determine the number of CD4⁺ T cells specific for the proIns 76-90 (K88S) peptide. The experimental conditions tested as shown in FIG. 41A were: i) media alone; ii) peptide plus IL-2; iii) peptide plus IL-2 plus proIns 76-90 (K88S)-Modless (2932+2639); and iv) peptide plus IL-2 plus proIns 76-90 (K88S)-PDL1 (3005+2639). The experimental conditions tested as shown in FIG. 41B were: i) media alone; ii) peptide plus IL-2; iii) peptide plus IL-2 plus GAD65 555-567 (F557I )-PDL1 (3005+2580); and iv) peptide plus IL-2 plus proIns 76-90 (K88S)-PDL1 (3005+2639). For FIG. 41A and FIG. 41B, the included components in an experimental condition are indicated with a “+” and excluded components in an experimental condition are indicated with a “−”, with the exception of IL-2, which was included in all experimental conditions.

### FACS Analysis

[0841] Within the PBMCs treated as described above, ProIns 76-90 (K88S)/DR4-specific T cells were detected using biotinylated proIns 76-90 (K88S)/DR4 Class II HLA complexes tetramerized around a fluorescently labeled streptavidin core containing four biotin binding sites (for simplicity, referred to as “tetramer”). Tetramer binding to T cells was detected by fluorescence activated cell sorting (FACS) and indicated the ability of T cells to bind proIns 76-90 (K88S) peptide when complexed with HLA class II DR4 α and β chains (DRA1*0101 α chain and DRB1*04010 chain).

### Results

[0842] The results are shown in FIG. 41A and FIG. 41B. As shown in FIG. 41A and FIG. 41B, the 3005+2639 TMAPP reduced the number of CD4⁺ T cells specific for the proIns 76-90 (K88S) peptide. The effect was epitope specific, as the 3005+2580 TMAPP did not reduce the number of CD4⁺ T cells specific for the proIns 76-90 (K88S) peptide (FIG. 41B). The inhibition of proIns 76-90 (K88S)/DR4-specific T cell expansion was therefore dependent on the presence of both the correct antigen-specific targeting via the peptide-HLA component of the TMAPP as well as the PDL1 immunomodulatory polypeptide.

[0843] Data for PBMCs from two different T1D individuals are shown in FIG. 45. As shown in FIG. 45, right panel, the 3005+2639 TMAPP (“Pep Proins IST”) selectively inhibited expansion of CD4⁺ T cell specific for proIns 76-90 (K88S) peptide in PBMCs from two different T1D donors. As shown in FIG. 45, right panel, neither peptide alone (“Pep”) nor the 3005+2580 TMAPP (“Pep GAD65 IST”) reduced the number of CD4⁺ T cells specific for the proIns 76-90 (K88S) peptide.

### Example 4: Effect of In Vivo Administration of a TMMP

### FIG. 46

[0844] The in vivo activity of Proins-DR4-PDL1 IST (the 3005+2639 TMAPP described in Example 3; also referred to as “Proins-DR4-PDL1 IST (3005-2639)” or simply “3005-2639”) was tested in human HLA-DRB1*04 transgenic mice. Mice were simultaneously immunized with Proins (PI; 76-90, K88S) and influenza HA (307-319) peptides in Complete Freund's Adjuvant (CFA) on Day 0. On Days 1, 4, 8, and 11 post-immunization, the mice were treated intravenously with vehicle (“Veh”) or 20 mg/kg of Proins-DR4-PDL1 IST (3005-2639) (“IST”).

[0845] On Days 8, 12, 15, and 19 post-immunization blood samples were drawn from mice, peripheral blood mononuclear cells (PBMCs) purified, and seeded in an IFN-gamma (IFNγ) enzyme-linked immunospot (ELISpot) assay. Briefly, PBMCs were stimulated in duplicate wells with PMA/ionomycin, an irrelevant HIV peptide, Proins (PI; 76-90, K88S), or influenza hemagglutinin (HA) (307-319) peptides and incubated for 20 hours before developing the plate per the manufacturer's protocol. The number of antigen-specific cells per 10⁶ PBMCs was expressed as spot forming cells (SFC) per e6 cells.

[0846] The data are shown in FIG. 46. While vehicle treatment did not affect the frequency of Proins- or HA-reactive T cells, treatment with Proins-DR4-PDL1 IST selectively reduced the number of Proins (PI)-reactive T cells without impacting the frequency of HA-reactive T cells.

### FIG. 47

[0847] From the same experiment as above, PBMCs from the blood and spleens of treated mice were similarly stimulated in an interleukin-2 (IL-2) ELISpot assay. The data are shown in FIG. 47. The frequencies (expressed as SFC per 10⁶ cells) of Proins (PI)-reactive T cells that produce IFN-γ or IL-2 are shown in both blood and spleen samples on Days 12 and 19 post-immunization in treated or untreated animals. Statistical significance was assessed by unpaired t-test (* p<0.05; ** p<0.01; ns=not significant). Treatment with Proins-DR4-PDL1 IST (3005-2639) (“IST Treated”) significantly reduced the frequency of PI-reactive T cells in the blood and spleen.

### FIG. 48

[0848] Inhibition of cytokine-producing T cells by TMMP (“IST”) treatment was further demonstrated using intracellular cytokine staining and flow cytometry. HLA-DRB1*04 transgenic mice were immunized, as described above, with Proins (PI; 76-90, K88S) peptide alone or together with influenza HA (307-319) peptide in CFA. Animals were then untreated or treated intravenously with 20 mg/kg Proins-DR4-PDL1 IST (3005-2639) (“IST”) on Days 1, 4, 8, and 11 post-immunization prior to harvesting of spleens on Day 12 post-immunization. Spleens were then dissociated into single cell suspensions and stimulated with Proins (PI; 76-90, K88S) or HA (307-319) peptides and cytokine production was analyzed by flow cytometry. Splenic CD4+ T cells from animals that were immunized with Proins alone, or with Proins and HA, produced IFN-γ and/or IL-2 upon stimulation with Proins peptide.

[0849] The data are shown in FIG. 48. Treatment of these animals with Proins-DR4-PDL1 IST (3005-2639) significantly reduced the frequency of splenic CD4⁺ T cells producing cytokine in response to Proins peptide stimulation. In contrast, HA-reactive CD4⁺ T cells were only observed in the spleens of animals that were co-immunized with Proins and HA, and the frequency of these HA-reactive CD4⁺ T cells was not altered by treatment with Proins-DR4-PDL1 IST (3005-2639), confirming the peptide antigen specificity of the Proins-DR4-PDL1 IST.

### FIG. 49

[0850] Cytokine production in the Proins-reactive CD4⁺ T cells in the above experiment was further quantified by measuring the geometric mean fluorescence intensity (gMFI) of staining in cytokine-positive cells. The data are shown in FIG. 49. In animals that were treated with Proins-DR4-PDL1 IST (3005-2639), the remaining Proins-reactive CD4⁺ T cells exhibited significantly reduced expression levels (gMFI) of IFN-γ, IL-2, TNF-α, and IL-17 upon stimulation with Proins peptide.

### FIG. 50

[0851] The in vivo activity of Proins-DR4-PDL1 IST was further tested in human HLA-DRB1*04 transgenic mice. Mice were simultaneously immunized with Proins (PI; 76-90, K88S) and HA (307-319) peptides in Complete Freund's Adjuvant (CFA) on Day 0. On Day 11 post-immunization, the mice were treated intravenously with vehicle or 20 mg/kg of Proins-DR4-PDL1 IST (3005-2639). On Days 11 (before treatment), 12, and 13 post-immunization, blood samples were drawn from mice, PBMCs purified, and seeded in an IL-2 ELISpot assay. PBMCs were stimulated with PMA/ionomycin, an irrelevant HIV peptide, Proins (PI; 76-90, K88S), or HA (307-319) peptides.

[0852] The data are shown in FIG. 50. Representative ELISpot wells are shown for each treatment group and timepoint. The frequencies of Proins- and HA-reactive T cells are also shown for each animal. A single treatment with Proins-DR4-PDL1 IST (3005-2639) on Day 11 post-immunization resulted in a highly significant reduction in the frequency of Proins-reactive T cells on Day 12 that was maintained through at least Day 13 post-immunization. This suppression of Proins-reactive T cells was antigen specific as HA-reactive T cells were not suppressed.

[0853] While the present invention has been described with reference to the specific embodiments thereof, it should be understood by those skilled in the art that various changes may be made and equivalents may be substituted without departing from the true spirit and scope of the invention. In addition, many modifications may be made to adapt a particular situation, material, composition of matter, process, process step or steps, to the objective, spirit and scope of the present invention. All such modifications are intended to be within the scope of the claims appended hereto.

The application's sequence listing, which the Patent Office published only in electronic form, follows.

SEQUENCE LISTING (452 sequences)

SEQ ID NO: 1 - protein, 50 aa, Artificial Sequence
  Synthetic sequence
  VARIANT (6)..(50): Each copy of Gly Gly Gly Gly Ser at positions 6 to 50 may either be present or absent
GGGGSGGGGSGGGGSGGGGSGGGGSGGGGSGGGGSGGGGSGGGGSGGGGS

SEQ ID NO: 2 - protein, 8 aa, Artificial Sequence
  Synthetic sequence
GGSAAAGG

SEQ ID NO: 3 - protein, 106 aa, Artificial Sequence
  Synthetic sequence
ASTKGPSVFPLAPSSKSTSGGTAALGCLVKDYFPEPVTVSWNSGALTSGVHTFPAVLQSSGLYSLSSVVTVPSSSLGTQTYICNVNHKPSNTKVDKKVEPKSCDKT

SEQ ID NO: 4 - protein, 106 aa, Artificial Sequence
  Synthetic sequence
TVAAPSVFIFPPSDEQLKSGTASVVCLLNNFYPREAKVQWKVDNALQSGNSQESVTEQDSKDSTYSLSSTLTLSKADYEKHKVYACEVTHQGLSSPVTKSFNRGEC

SEQ ID NO: 5 - protein, 178 aa, Artificial Sequence
  Synthetic sequence
IKEEHVIIQAEFYLNPDQSGEFMFDFDGDEIFHVDMAKKETVWRLEEFGRFASFEAQGALANIAVDKANLEIMTKRSNYTPITNVPPEVTVLTNSPVELREPNVLICFIDKFTPPVVNVTWLRNGKPVTTGVSETVFLPREDHLFRKFHYLPFLPSTEDVYDCRVEHWGLDEPLLKHW

SEQ ID NO: 6 - protein, 79 aa, Artificial Sequence
  Synthetic sequence
VIIQAEFYLNPDQSGEFMFDFDGDEIFHVDMAKKETVWRLEEFGRFASFEAQGALANIAVDKANLEIMTKRSNYTPITN

SEQ ID NO: 7 - protein, 94 aa, Artificial Sequence
  Synthetic sequence
VPPEVTVLTNSPVELREPNVLICFIDKFTPPVVNVTWLRNGKPVTTGVSETVFLPREDHLFRKFHYLPFLPSTEDVYDCRVEHWGLDEPLLKHW

SEQ ID NO: 8 - protein, 191 aa, Artificial Sequence
  Synthetic sequence
VPEAPTPMWPDDLQNHTFLHTVYCQDGSPSVGLSEAYDEDQLFFFDFSQNTRVPRLPEFADWAQEQGDAPAILFDKEFCEWMIQQIGPKLDGKIPVSRGFPIAEVFTLKPLEFGKPNTLVCFVSNLFPPMLTVNWQHHSVPVEGFGPTFVSAVDGLSFQAFSYLNFTPEPSDIFSCIVTHEIDRYTAIAYW

SEQ ID NO: 9 - protein, 98 aa, Artificial Sequence
  Synthetic sequence
VPEAPTPMWPDDLQNHTFLHTVYCQDGSPSVGLSEAYDEDQLFFFDFSQNTRVPRLPEFADWAQEQGDAPAILFDKEFCEWMIQQIGPKLDGKIPVSR

SEQ ID NO: 10 - protein, 93 aa, Artificial Sequence
  Synthetic sequence
GFPIAEVFTLKPLEFGKPNTLVCFVSNLFPPMLTVNWQHHSVPVEGFGPTFVSAVDGLSFQAFSYLNFTPEPSDIFSCIVTHEIDRYTAIAYW

SEQ ID NO: 11 - protein, 179 aa, Artificial Sequence
  Synthetic sequence
TKADHMGSYGPAFYQSYGASGQFTHEFDEEQLFSVDLKKSEAVWRLPEFGDFARFDPQGGLAGIAAIKAHLDILVERSNRSRAINVPPRVTVLPKSRVELGQPNILICIVDNIFPPVINITWLRNGQTVTEGVAQTSFYSQPDHLFRKFHYLPFVPSAEDVYDCQVEHWGLDAPLLRHW

SEQ ID NO: 12 - protein, 85 aa, Artificial Sequence
  Synthetic sequence
TKADHMGSYGPAFYQSYGASGQFTHEFDEEQLFSVDLKKSEAVWRLPEFGDFARFDPQGGLAGIAAIKAHLDILVERSNRSRAIN

SEQ ID NO: 13 - protein, 94 aa, Artificial Sequence
  Synthetic sequence
VPPRVTVLPKSRVELGQPNILICIVDNIFPPVINITWLRNGQTVTEGVAQTSFYSQPDHLFRKFHYLPFVPSAEDVYDCQVEHWGLDAPLLRHW

SEQ ID NO: 14 - protein, 181 aa, Artificial Sequence
  Synthetic sequence
AGAIKADHVSTYAAFVQTHRPTGEFMFEFDEDEMFYVDLDKKETVWHLEEFGQAFSFEAQGGLANIAILNNNLNTLIQRSNHTQATNDPPEVTVFPKEPVELGQPNTLICHIDKFFPPVLNVTWLCNGELVTEGVAESLFLPRTDYSFHKFHYLTFVPSAEDFYDCRVEHWGLDQPLLKHW

SEQ ID NO: 15 - protein, 85 aa, Artificial Sequence
  Synthetic sequence
AIKADHVSTYAAFVQTHRPTGEFMFEFDEDEMFYVDLDKKETVWHLEEFGQAFSFEAQGGLANIAILNNNLNTLIQRSNHTQATN

SEQ ID NO: 16 - protein, 94 aa, Artificial Sequence
  Synthetic sequence
DPPEVTVFPKEPVELGQPNTLICHIDKFFPPVLNVTWLCNGELVTEGVAESLFLPRTDYSFHKFHYLTFVPSAEDFYDCRVEHWGLDQPLLKHW

SEQ ID NO: 17 - protein, 260 aa, Artificial Sequence [sequence omitted]

SEQ ID NO: 18 - protein, 181 aa, Artificial Sequence
  Synthetic sequence
EDIVADHVASCGVNLYQFYGPSGQYTHEFDGDEQFYVDLERKETAWRWPEFSKFGGFDPQGALRNMAVAKHNLNIMIKRYNSTAATNEVPEVTVFSKSPVTLGQPNTLICLVDNIFPPVVNITWLSNGQSVTEGVSETSFLSKSDHSFFKISYLTFLPSADEIYDCKVEHWGLDQPLLKHW

SEQ ID NO: 19 - protein, 87 aa, Artificial Sequence
  Synthetic sequence
EDIVADHVASCGVNLYQFYGPSGQYTHEFDGDEQFYVDLERKETAWRWPEFSKFGGFDPQGALRNMAVAKHNLNIMIKRYNSTAATN

SEQ ID NO: 20 - protein, 94 aa, Artificial Sequence
  Synthetic sequence
EVPEVTVFSKSPVTLGQPNTLICLVDNIFPPVVNITWLSNGQSVTEGVSETSFLSKSDHSFFKISYLTFLPSADEIYDCKVEHWGLDQPLLKHW

SEQ ID NO: 21 - protein, 181 aa, Artificial Sequence
  Synthetic sequence
EDIVADHVASYGVNFYQSHGPSGQYTHEFDGDEEFYVDLETKETVWQLPMFSKFISFDPQSALRNMAVGKHTLEFMMRQSNSTAATNEVPEVTVFSKFPVTLGQPNTLICLVDNIFPPVVNITWLSNGHSVTEGVSETSFLSKSDHSFFKISYLTFLPSADEIYDCKVEHWGLDEPLLKHW

SEQ ID NO: 22 - protein, 87 aa, Artificial Sequence
  Synthetic sequence
EDIVADHVASYGVNFYQSHGPSGQYTHEFDGDEEFYVDLETKETVWQLPMFSKFISFDPQSALRNMAVGKHTLEFMMRQSNSTAATN

SEQ ID NO: 23 - protein, 94 aa, Artificial Sequence
  Synthetic sequence
EVPEVTVFSKFPVTLGQPNTLICLVDNIFPPVVNITWLSNGHSVTEGVSETSFLSKSDHSFFKISYLTFLPSADEIYDCKVEHWGLDEPLLKHW

SEQ ID NO: 24 - protein, 197 aa, Artificial Sequence
  Synthetic sequence
DTRPRFLEQVKHECHFFNGTERVRFLDRYFYHQEEYVRFDSDVGEYRAVTELGRPDAEYWNSQKDLLEQKRAAVDTYCRHNYGVGESFTVQRRVYPEVTVYPAKTQPLQHHNLLVCSVNGFYPGSIEVRWFRNGQEEKTGVVSTGLIQNGDWTFQTLVMLETVPRSGEVYTCQVEHPSLTSPLTVEWRARSESAQSK

SEQ ID NO: 25 - protein, 94 aa, Artificial Sequence
  Synthetic sequence
DTRPRFLEQVKHECHFFNGTERVRFLDRYFYHQEEYVRFDSDVGEYRAVTELGRPDAEYWNSQKDLLEQKRAAVDTYCRHNYGVGESFTVQRRV

SEQ ID NO: 26 - protein, 103 aa, Artificial Sequence
  Synthetic sequence
YPEVTVYPAKTQPLQHHNLLVCSVNGFYPGSIEVRWFRNGQEEKTGVVSTGLIQNGDWTFQTLVMLETVPRSGEVYTCQVEHPSLTSPLTVEWRARSESAQSK

SEQ ID NO: 27 - protein, 197 aa, Artificial Sequence
  Synthetic sequence
DTRPRFLELRKSECHFFNGTERVRYLDRYFHNQEEFLRFDSDVGEYRAVTELGRPVAESWNSQKDLLEQKRGRVDNYCRHNYGVGESFTVQRRVHPQVTVYPAKTQPLQHHNLLVCSVSGFYPGSIEVRWFRNGQEEKAGVVSTGLIQNGDWTFQTLVMLETVPRSGEVYTCQVEHPSVTSALTVEWRARSESAQSK

SEQ ID NO: 28 - protein, 94 aa, Artificial Sequence
  Synthetic sequence
DTRPRFLELRKSECHFFNGTERVRYLDRYFHNQEEFLRFDSDVGEYRAVTELGRPVAESWNSQKDLLEQKRGRVDNYCRHNYGVGESFTVQRRV

SEQ ID NO: 29 - protein, 103 aa, Artificial Sequence
  Synthetic sequence
HPQVTVYPAKTQPLQHHNLLVCSVSGFYPGSIEVRWFRNGQEEKAGVVSTGLIQNGDWTFQTLVMLETVPRSGEVYTCQVEHPSVTSALTVEWRARSESAQSK

SEQ ID NO: 30 - protein, 208 aa, Artificial Sequence
  Synthetic sequence
TVLSSPLALAGDTQPRFLEQAKCECHFLNGTERVWNLIRYIYNQEEYARYNSDLGEYQAVTELGRPDAEYWNSQKDLLERRRAEVDTYCRYNYGVVESFTVQRRVQPKVTVYPSKTQPLQHHNLLVCSVNGFYPGSIEVRWFRNGQEEKAGVVSTGLIQNGDWTFQTLVMLETVPRSGEVYTCQVEHPSMMSPLTVQWSARSESAQSK

SEQ ID NO: 31 - protein, 105 aa, Artificial Sequence
  Synthetic sequence
TVLSSPLALAGDTQPRFLEQAKCECHFLNGTERVWNLIRYIYNQEEYARYNSDLGEYQAVTELGRPDAEYWNSQKDLLERRRAEVDTYCRYNYGVVESFTVQRRV

SEQ ID NO: 32 - protein, 103 aa, Artificial Sequence
  Synthetic sequence
QPKVTVYPSKTQPLQHHNLLVCSVNGFYPGSIEVRWFRNGQEEKAGVVSTGLIQNGDWTFQTLVMLETVPRSGEVYTCQVEHPSMMSPLTVQWSARSESAQSK

SEQ ID NO: 33 - protein, 207 aa, Artificial Sequence
  Synthetic sequence
MVLSSPLALAGDTRPRFLQQDKYECHFFNGTERVRFLHRDIYNQEEDLRFDSDVGEYRAVTELGRPDAEYWNSQKDFLEDRRAAVDTYCRHNYGVGESFTVQRRVEPKVTVYPARTQTLQHHNLLVCSVNGFYPGSIEVRWFRNSQEEKAGVVSTGLIQNGDWTFQTLVMLETVPRSGEVYTCQVEHPSVTSPLTVEWRAQSESAQS

SEQ ID NO: 34 - protein, 105 aa, Artificial Sequence
  Synthetic sequence
MVLSSPLALAGDTRPRFLQQDKYECHFFNGTERVRFLHRDIYNQEEDLRFDSDVGEYRAVTELGRPDAEYWNSQKDFLEDRRAAVDTYCRHNYGVGESFTVQRRV

SEQ ID NO: 35 - protein, 102 aa, Artificial Sequence
  Synthetic sequence
EPKVTVYPARTQTLQHHNLLVCSVNGFYPGSIEVRWFRNSQEEKAGVVSTGLIQNGDWTFQTLVMLETVPRSGEVYTCQVEHPSVTSPLTVEWRAQSESAQS

SEQ ID NO: 36 - protein, 189 aa, Artificial Sequence
  Synthetic sequence
GGFVAHVESTCLLDDAGTPKDFTYCISFNKDLLTCWDPEENKMAPCEFGVLNSLANVLSQHLNQKDTLMQRLRNGLQNCATHTQPFWGSLTNRTRPPSVQVAKTTPFNTREPVMLACYVWGFYPAEVTITWRKNGKLVMPHSSAHKTAQPNGDWTYQTLSHLALTPSYGDTYTCVVEHTGAPEPILRDW

SEQ ID NO: 37 - protein, 94 aa, Artificial Sequence
  Synthetic sequence
GGFVAHVESTCLLDDAGTPKDFTYCISFNKDLLTCWDPEENKMAPCEFGVLNSLANVLSQHLNQKDTLMQRLRNGLQNCATHTQPFWGSLTNRT

SEQ ID NO: 38 - protein, 95 aa, Artificial Sequence
  Synthetic sequence
RPPSVQVAKTTPFNTREPVMLACYVWGFYPAEVTITWRKNGKLVMPHSSAHKTAQPNGDWTYQTLSHLALTPSYGDTYTCVVEHTGAPEPILRDW

SEQ ID NO: 39 - protein, 188 aa, Artificial Sequence
  Synthetic sequence
TDSPEDFVIQAKADCYFTNGTEKVQFVVRFIFNLEEYVRFDSDVGMFVALTKLGQPDAEQWNSRLDLLERSRQAVDGVCRHNYRLGAPFTVGRKVQPEVTVYPERTPLLHQHNLLHCSVTGFYPGDIKIKWFLNGQEERAGVMSTGPIRNGDWTFQTVVMLEMTPELGHVYTCLVDHSSLLSPVSVEW

SEQ ID NO: 40 - protein, 94 aa, Artificial Sequence
  Synthetic sequence
TDSPEDFVIQAKADCYFTNGTEKVQFVVRFIFNLEEYVRFDSDVGMFVALTKLGQPDAEQWNSRLDLLERSRQAVDGVCRHNYRLGAPFTVGRK

SEQ ID NO: 41 - protein, 94 aa, Artificial Sequence
  Synthetic sequence
VQPEVTVYPERTPLLHQHNLLHCSVTGFYPGDIKIKWFLNGQEERAGVMSTGPIRNGDWTFQTVVMLEMTPELGHVYTCLVDHSSLLSPVSVEW

SEQ ID NO: 42 - protein, 186 aa, Artificial Sequence
  Synthetic sequence
RATPENYLFQGRQECYAFNGTQRFLERYIYNREEFARFDSDVGEFRAVTELGRPAAEYWNSQKDILEEKRAVPDRMCRHNYELGGPMTLQRRVQPRVNVSPSKKGPLQHHNLLVCHVTDFYPGSIQVRWFLNGQEETAGVVSTNLIRNGDWTFQILVMLEMTPQQGDVYTCQVEHTSLDSPVTVEW

SEQ ID NO: 43 - protein, 92 aa, Artificial Sequence
  Synthetic sequence
RATPENYLFQGRQECYAFNGTQRFLERYIYNREEFARFDSDVGEFRAVTELGRPAAEYWNSQKDILEEKRAVPDRMCRHNYELGGPMTLQRR

SEQ ID NO: 44 - protein, 94 aa, Artificial Sequence
  Synthetic sequence
VQPRVNVSPSKKGPLQHHNLLVCHVTDFYPGSIQVRWFLNGQEETAGVVSTNLIRNGDWTFQILVMLEMTPQQGDVYTCQVEHTSLDSPVTVEW

SEQ ID NO: 45 - protein, 188 aa, Artificial Sequence
  Synthetic sequence
RDSPEDFVFQFKGMCYFTNGTERVRLVTRYIYNREEYARFDSDVGVYRAVTPQGRPDAEYWNSQKEVLEGTRAELDTVCRHNYEVAFRGILQRRVEPTVTISPSRTEALNHHNLLVCSVTDFYPGQIKVRWFRNDQEETAGVVSTPLIRNGDWTFQILVMLEMTPQRGDVYTCHVEHPSLQSPITVEW

SEQ ID NO: 46 - protein, 94 aa, Artificial Sequence
  Synthetic sequence
RDSPEDFVFQFKGMCYFTNGTERVRLVTRYIYNREEYARFDSDVGVYRAVTPQGRPDAEYWNSQKEVLEGTRAELDTVCRHNYEVAFRGILQRR

SEQ ID NO: 47 - protein, 94 aa, Artificial Sequence
  Synthetic sequence
VEPTVTISPSRTEALNHHNLLVCSVTDFYPGQIKVRWFRNDQEETAGVVSTPLIRNGDWTFQILVMLEMTPQRGDVYTCHVEHPSLQSPITVEW

SEQ ID NO: 48 - protein, 182 aa, Artificial Sequence
  Synthetic sequence
DFLVQFKGMCYFTNGTERVRGVARYIYNREEYGRFDSDVGEFQAVTELGRSIEDWNNYKDFLEQERAAVDKVCRHNYEAELRTTLQRQVEPTVTISPSRTEALNHHNLLVCSVTDFYPAQIKVRWFRNDQEETAGVVSTSLIRNGDWTFQILVMLEITPQRGDIYTCQVEHPSLQSPITVEW

SEQ ID NO: 49 - protein, 93 aa, Artificial Sequence
  Synthetic sequence
DFLVQFKGMCYFTNGTERVRGVARYIYNREEYGRFDSDVGEFQAVTELGRSIEDWNNYKDFLEQERAAVDKVCRHNYEAELRTTLQRQVEPTV

SEQ ID NO: 50 - protein, 89 aa, Artificial Sequence
  Synthetic sequence
TISPSRTEALNHHNLLVCSVTDFYPAQIKVRWFRNDQEETAGVVSTSLIRNGDWTFQILVMLEITPQRGDIYTCQVEHPSLQSPITVEW

SEQ ID NO: 51 - protein, 33 aa, Artificial Sequence
  Synthetic sequence
LQLQPFPQPELPYPQPELPYPQPELPYPQPQPF

SEQ ID NO: 52 - protein, 19 aa, Artificial Sequence
  Synthetic sequence
LGQQQPFPPQQPYPQPQPF

SEQ ID NO: 53 - protein, 266 aa, Artificial Sequence [sequence omitted]

SEQ ID NO: 54 - protein, 266 aa, Artificial Sequence [sequence omitted]

SEQ ID NO: 55 - protein, 261 aa, Artificial Sequence
  Synthetic sequence
MSWKKALRIPGGLRAATVTLMLSMLSTPVAEGRDSPEDFVYQFKGMCYFTNGTERVRLVSRSIYNREEIVRFDSDVGEFRAVTLLGLPAAEYWNSQKDILERKRAAVDRVCRHNYQLELRTTLQRRVEPTVTISPSRTEALNHHNLLVCSVTDFYPAQIKVRWFRNDQEETAGVVSTPLIRNGDWTFQILVMLEMTPQRGDVYTCHVEHPSLQSPITVEWRAQSESAQSKMLSGIGGFVLGLIFLGLGLIIHHRSQKGLLH

SEQ ID NO: 56 - protein, 261 aa, Artificial Sequence [sequence omitted]

SEQ ID NO: 57 - protein, 226 aa, Artificial Sequence
  Synthetic sequence
DKTHTCPPCPAPEAAGGPSVFLFPPKPKDTLMISRTPEVTCVVVDVSHEDPEVKFNWYVDGVEVHNAKTKPREEQYNSTYRVVSVLTVLHQDWLNGKEYKCKVSNKALPAPIEKTISKAKGQPREPQVYTLPPSREEMTKNQVSLTCLVKGFYPSDIAVEWESNGQPENNYKTTPPVLDSDGSFFLYSKLTVDKSRWQQGNVFSCSVMHEALHNHYTQKSLSLSPG

SEQ ID NO: 58 - protein, 102 aa, Artificial Sequence
  Synthetic sequence
EVTVYPAKTQPLQHHNLLVCSVNGFYPASIEVRWFRNGQEEKTGVVSTGLIQNGDWTFQTLVMLETVPRSGEVYTCQVEHPSLTSPLTVEWRARSESAQSKM

SEQ ID NO: 59 - protein, 5 aa, Artificial Sequence
  Synthetic sequence
  VARIANT (4)..(4): The amino acid at position 4 is any amino acid other than Pro.
VPGXG

SEQ ID NO: 60 - protein, 223 aa, Artificial Sequence
  Synthetic sequence
PPCPSCPAPEFLGGPSVFLFPPKPKDTLMISRTPEVTCVVVDVSQEDPEVQFNWYVDGVEVHNAKTKPREEQFNSTYRVVSVLTVLHQDWLNGKEYKCKVSNKGLPSSIEKTISKAKGQPREPQVYTLPPSQEEMTKNQVSLTCLVKGFYPSDIAVEWESNGQPENNYKTTPPVLDSDGSFFLYSRLTVDKSRWQEGNVFSCSVMHEALHNHYTQKSLSLSPG

SEQ ID NO: 61 - protein, 5 aa, Artificial Sequence
  Synthetic sequence
GSGGS

SEQ ID NO: 62 - protein, 4 aa, Artificial Sequence
  Synthetic sequence
GGGS

SEQ ID NO: 63 - protein, 4 aa, Artificial Sequence
  Synthetic sequence
GGSG

SEQ ID NO: 64 - protein, 5 aa, Artificial Sequence
  Synthetic sequence
GGSGG

SEQ ID NO: 65 - protein, 5 aa, Artificial Sequence
  Synthetic sequence
GSGSG

SEQ ID NO: 66 - protein, 5 aa, Artificial Sequence
  Synthetic sequence
GSGGG

SEQ ID NO: 67 - protein, 5 aa, Artificial Sequence
  Synthetic sequence
GGGSG

SEQ ID NO: 68 - protein, 5 aa, Artificial Sequence
  Synthetic sequence
GSSSG

SEQ ID NO: 69 - protein, 50 aa, Artificial Sequence
  Synthetic sequence
  VARIANT (6)..(50): Each copy of Gly Ser Ser Ser Ser at positions 6 to 50 may either be present or absent
GSSSSGSSSSGSSSSGSSSSGSSSSGSSSSGSSSSGSSSSGSSSSGSSSS

SEQ ID NO: 70 - protein, 5 aa, Artificial Sequence
  Synthetic sequence
AAAGG

SEQ ID NO: 71 - protein, 15 aa, Artificial Sequence
  Synthetic sequence
GCGASGGGGSGGGGS

SEQ ID NO: 72 - protein, 17 aa, Artificial Sequence
  Synthetic sequence
GAGSLQPLALEGSLQKR

SEQ ID NO: 73 - protein, 15 aa, Artificial Sequence
  Synthetic sequence
GIVDQCCTSICSLYQ

SEQ ID NO: 74 - protein, 15 aa, Artificial Sequence
  Synthetic sequence
GIVEQCCTSICSLYQ

SEQ ID NO: 75 - protein, 13 aa, Artificial Sequence
  Synthetic sequence
NFFRMVISNPAAT

SEQ ID NO: 76 - protein, 13 aa, Artificial Sequence
  Synthetic sequence
NFIRMVISNPAAT

SEQ ID NO: 77 - protein, 20 aa, Artificial Sequence
  Synthetic sequence
SFYLKNVQTQETRTLTQFHF

SEQ ID NO: 78 - protein, 15 aa, Artificial Sequence
  Synthetic sequence
SLQPLALEGSLQSRG

SEQ ID NO: 79 - protein, 314 aa, Artificial Sequence
  Synthetic sequence
MKTLLILTILAMATTIATANMQVDPSGQVQWPQQQPFPQPQQPFCEQPQRTIPQPHQTFHHQPQQTFPQPEQTYPHQPQQQFPQTQQPQQPFPQPQQTFPQQPQLPFPQQPQQPFPQPQQPQQPFPQSQQPQQPFPQPQQQFPQPQQPQQSFPQQQQPLIQPYLQQQMNPCKNYLLQQCNPVSLVSSLVSMILPRSDCKVMRQQCCQQLAQIPQQLQCAAIHGIVHSIIMQQEQQQQQQQQQQQQQQQGIQIMRPLFQLVQGQGIIQPQQPAQLEVIRSLVLGTLPTMCNVFVPPECSTTKAPFASIVADIGGQ

SEQ ID NO: 80 - protein, 7 aa, Artificial Sequence
  Synthetic sequence
QPFPQPQ

SEQ ID NO: 81 - protein, 9 aa, Artificial Sequence
  Synthetic sequence
PFPQPQLPY

SEQ ID NO: 82 - protein, 9 aa, Artificial Sequence
  Synthetic sequence
PFPQPELPY

SEQ ID NO: 83 - protein, 12 aa, Artificial Sequence
  Synthetic sequence
QLQPFPQPELPY

SEQ ID NO: 84 - protein, 11 aa, Artificial Sequence
  Synthetic sequence
LQPFPQPELPY

SEQ ID NO: 85 - protein, 11 aa, Artificial Sequence
  Synthetic sequence
PQPELPYPQPE

SEQ ID NO: 86 - protein, 12 aa, Artificial Sequence
  Synthetic sequence
QPFPQPEQPFPW

SEQ ID NO: 87 - protein, 15 aa, Artificial Sequence
  Synthetic sequence
ADAQLQPFPQPELPY

SEQ ID NO: 88 - protein, 14 aa, Artificial Sequence
  Synthetic sequence
ADALQPFPQPELPY

SEQ ID NO: 89 - protein, 13 aa, Artificial Sequence
  Synthetic sequence
ADAQPFPQPELPY

SEQ ID NO: 90 - protein, 12 aa, Artificial Sequence
  Synthetic sequence
ADAPFPQPELPY

SEQ ID NO: 91 - protein, 12 aa, Artificial Sequence
  Synthetic sequence
QLQIFPQPELPY

SEQ ID NO: 92 - protein, 12 aa, Artificial Sequence
  Synthetic sequence
QLQPFPEPELPY

SEQ ID NO: 93 - protein, 12 aa, Artificial Sequence
  Synthetic sequence
QLQPFPQPEEPY

SEQ ID NO: 94 - protein, 12 aa, Artificial Sequence
  Synthetic sequence
QLQIFPEPEEPY

SEQ ID NO: 95 - protein, 12 aa, Artificial Sequence
  Synthetic sequence
QPQPELPYPQPE

SEQ ID NO: 96 - protein, 15 aa, Artificial Sequence
  Synthetic sequence
ADAQPQPELPYPQPE

SEQ ID NO: 97 - protein, 14 aa, Artificial Sequence
  Synthetic sequence
ADAPQPELPYPQPE

SEQ ID NO: 98 - protein, 11 aa, Artificial Sequence
  Synthetic sequence
IQPELPYPQPE

SEQ ID NO: 99 - protein, 11 aa, Artificial Sequence
  Synthetic sequence
PQPELPEPQPE

SEQ ID NO: 100 - protein, 11 aa, Artificial Sequence
  Synthetic sequence
IQPELPEPQPE

SEQ ID NO: 101 - protein, 12 aa, Artificial Sequence
  Synthetic sequence
QLQPFPQPCLPY

SEQ ID NO: 102 - protein, 11 aa, Artificial Sequence
  Synthetic sequence
PQPELCYPQPE

SEQ ID NO: 103 - protein, 245 aa, Homo sapiens
MRIFAVFIFMTYWHLLNAFTVTVPKDLYVVEYGSNMTIECKFPVEKQLDLAALIVYWEMEDKNIIQFVHGEEDLKVQHSSYRQRARLLKDQLSLGNAALQITDVKLQDAGVYRCMISYGGADYKRITVKVNAPYNKINQRILVVDPVTSEHELTCQAEGYPKAEVIWTSSDHQVLSGKTTTTNSKREEKLFNVTSTLRINTTTNEIFYCTFRRLDPEENHTAELVIPGNILNVSIKICLTLSPST

SEQ ID NO: 104 - protein, 219 aa, Homo sapiens
FTVTVPKDLYVVEYGSNMTIECKFPVEKQLDLAALIVYWEMEDKNIIQFVHGEEDLKVQHSSYRQRARLLKDQLSLGNAALQITDVKLQDAGVYRCMISYGGADYKRITVKVNAPYNKINQRILVVDPVTSEHELTCQAEGYPKAEVIWTSSDHQVLSGKTTTTNSKREEKLFNVTSTLRINTTTNEIFYCTFRRLDPEENHTAELVIPGNILNVSIKI

SEQ ID NO: 105 - protein, 268 aa, Homo sapiens
PGWFLDSPDRPWNPPTFSPALLVVTEGDNATFTCSFSNTSESFVLNWYRMSPSNQTDKLAAFPEDRSQPGQDCRFRVTQLPNGRDFHMSVVRARRNDSGTYLCGAISLAPKAQIKESLRAELRVTERRAEVPTAHPSPSPRPAGQFQTLVVGVVGGLLGSLVLLVWVLAVICSRAARGTIGARRTGQPLKEDPSAVPVFSVDYGELDFQWREKTPEPPVPCVPEQTEYATIVFPSGMGTSSPARRGSADGPRSAQPLRPEDGHCSWPL

SEQ ID NO: 106 - protein, 219 aa, Artificial Sequence
  Synthetic sequence
  VARIANT (8)..(8): The amino acid at position 8  is any amino acid other than Ile. In some cases, it is Asp.
FTVTVPKXLYVVEYGSNMTIECKFPVEKQLDLAALIVYWEMEDKNIIQFVHGEEDLKVQHSSYRQRARLLKDQLSLGNAALQITDVKLQDAGVYRCMISYGGADYKRITVKVNAPYNKINQRILVVDPVTSEHELTCQAEGYPKAEVIWTSSDHQVLSGKTTTTNSKREEKLFNVTSTLRINTTTNEIFYCTFRRLDPEENHTAELVIPGNILNVSIKI

SEQ ID NO: 107 - protein, 219 aa, Artificial Sequence
  Synthetic sequence
  VARIANT (36)..(36): The amino acid at position 36 is any amino acid other than Ile. In some cases, it is Asp.
FTVTVPKDLYVVEYGSNMTIECKFPVEKQLDLAALXVYWEMEDKNIIQFVHGEEDLKVQHSSYRQRARLLKDQLSLGNAALQITDVKLQDAGVYRCMISYGGADYKRITVKVNAPYNKINQRILVVDPVTSEHELTCQAEGYPKAEVIWTSSDHQVLSGKTTTTNSKREEKLFNVTSTLRINTTTNEIFYCTFRRLDPEENHTAELVIPGNILNVSIKI

SEQ ID NO: 108 - protein, 219 aa, Artificial Sequence
  Synthetic sequence
  VARIANT (54)..(54): The amino acid at position 54 is any amino acid other than Glu. In some cases, it is Arg.
FTVTVPKDLYVVEYGSNMTIECKFPVEKQLDLAALIVYWEMEDKNIIQFVHGEXDLKVQHSSYRQRARLLKDQLSLGNAALQITDVKLQDAGVYRCMISYGGADYKRITVKVNAPYNKINQRILVVDPVTSEHELTCQAEGYPKAEVIWTSSDHQVLSGKTTTTNSKREEKLFNVTSTLRINTTTNEIFYCTFRRLDPEENHTAELVIPGNILNVSIKI

SEQ ID NO: 109 - protein, 208 aa, Homo sapiens [sequence omitted]

SEQ ID NO: 110 - protein, 220 aa, Homo sapiens
MLRLLLALNLFPSIQVTGNKILVKQSPMLVAYDNAVNLSCKYSYNLFSREFRASLHKGLDSAVEVCVVYGNYSQQLQVYSKTGFNCDGKLGNESVTFYLQNLYVNQTDIYFCKIEVMYPPPYLDNEKSNGTIIHVKGKHLCPSPLFPGPSKPFWVLVVVGGVLACYSLLVTVAFIIFWVRSKRSRLLHSDYMNMTPRRPGPTRKHYQPYAPPRDFAAYRS

SEQ ID NO: 111 - protein, 123 aa, Homo sapiens
MLRLLLALNLFPSIQVTGNKILVKQSPMLVAYDNAVNLSWKHLCPSPLFPGPSKPFWVLVVVGGVLACYSLLVTVAFIIFWVRSKRSRLLHSDYMNMTPRRPGPTRKHYQPYAPPRDFAAYRS

SEQ ID NO: 112 - protein, 101 aa, Homo sapiens
MLRLLLALNLFPSIQVTGKHLCPSPLFPGPSKPFWVLVVVGGVLACYSLLVTVAFIIFWVRSKRSRLLHSDYMNMTPRRPGPTRKHYQPYAPPRDFAAYRS

SEQ ID NO: 113 - protein, 208 aa, Artificial Sequence
  Synthetic sequence
  VARIANT (19)..(19): The amino acid at position 19 is any amino acid other than Asn. In some cases, it is Ala.
VIHVTKEVKEVATLSCGHXVSVEELAQTRIYWQKEKKMVLTMMSGDMNIWPEYKNRTIFDITNNLSIVILALRPSDEGTYECVVLKYEKDAFKREHLAEVTLSVKADFPTPSISDFEIPTSNIRRIICSTSGGFPEPHLSWLENGEELNAINTTVSQDPETELYAVSSKLDFNMTTNHSFMCLIKYGHLRVNQTFNWNTTKQEHFPDN

SEQ ID NO: 114 - protein, 208 aa, Artificial Sequence
  Synthetic sequence
  VARIANT (63)..(63): The amino acid at position 63 is any amino acid other than Asn. In some cases, it is Ala.
VIHVTKEVKEVATLSCGHNVSVEELAQTRIYWQKEKKMVLTMMSGDMNIWPEYKNRTIFDITXNLSIVILALRPSDEGTYECVVLKYEKDAFKREHLAEVTLSVKADFPTPSISDFEIPTSNIRRIICSTSGGFPEPHLSWLENGEELNAINTTVSQDPETELYAVSSKLDFNMTTNHSFMCLIKYGHLRVNQTFNWNTTKQEHFPDN

SEQ ID NO: 115 - protein, 208 aa, Artificial Sequence
  Synthetic sequence
  VARIANT (67)..(67): The amino acid at position 67 is any amino acid other than Ile. In some cases, it is Ala.
VIHVTKEVKEVATLSCGHNVSVEELAQTRIYWQKEKKMVLTMMSGDMNIWPEYKNRTIFDITNNLSXVILALRPSDEGTYECVVLKYEKDAFKREHLAEVTLSVKADFPTPSISDFEIPTSNIRRIICSTSGGFPEPHLSWLENGEELNAINTTVSQDPETELYAVSSKLDFNMTTNHSFMCLIKYGHLRVNQTFNWNTTKQEHFPDN

SEQ ID NO: 116 - protein, 208 aa, Artificial Sequence
  Synthetic sequence
  VARIANT (86)..(86): The amino acid at position 86 is any amino acid other than Lys. In some cases, it is Ala.
VIHVTKEVKEVATLSCGHNVSVEELAQTRIYWQKEKKMVLTMMSGDMNIWPEYKNRTIFDITNNLSIVILALRPSDEGTYECVVLXYEKDAFKREHLAEVTLSVKADFPTPSISDFEIPTSNIRRIICSTSGGFPEPHLSWLENGEELNAINTTVSQDPETELYAVSSKLDFNMTTNHSFMCLIKYGHLRVNQTFNWNTTKQEHFPDN

SEQ ID NO: 117 - protein, 208 aa, Artificial Sequence
  Synthetic sequence
  VARIANT (157)..(157): The amino acid at position 157 is any amino acid other than Gln. In some cases, it is Ala.
VIHVTKEVKEVATLSCGHNVSVEELAQTRIYWQKEKKMVLTMMSGDMNIWPEYKNRTIFDITNNLSIVILALRPSDEGTYECVVLKYEKDAFKREHLAEVTLSVKADFPTPSISDFEIPTSNIRRIICSTSGGFPEPHLSWLENGEELNAINTTVSXDPETELYAVSSKLDFNMTTNHSFMCLIKYGHLRVNQTFNWNTTKQEHFPDN

SEQ ID NO: 118 - protein, 208 aa, Artificial Sequence
  Synthetic sequence
  VARIANT (158)..(158): The amino acid at position 158 is any amino acid other than Asp. In some cases, it is Ala.
VIHVTKEVKEVATLSCGHNVSVEELAQTRIYWQKEKKMVLTMMSGDMNIWPEYKNRTIFDITNNLSIVILALRPSDEGTYECVVLKYEKDAFKREHLAEVTLSVKADFPTPSISDFEIPTSNIRRIICSTSGGFPEPHLSWLENGEELNAINTTVSQXPETELYAVSSKLDFNMTTNHSFMCLIKYGHLRVNQTFNWNTTKQEHFPDN

SEQ ID NO: 119 - protein, 208 aa, Artificial Sequence
  Synthetic sequence
  VARIANT (25)..(25): The amino acid at position 25 is any amino acid other than Leu. In some cases, it is Ala.
VIHVTKEVKEVATLSCGHNVSVEEXAQTRIYWQKEKKMVLTMMSGDMNIWPEYKNRTIFDITNNLSIVILALRPSDEGTYECVVLKYEKDAFKREHLAEVTLSVKADFPTPSISDFEIPTSNIRRIICSTSGGFPEPHLSWLENGEELNAINTTVSQDPETELYAVSSKLDFNMTTNHSFMCLIKYGHLRVNQTFNWNTTKQEHFPDN

SEQ ID NO: 120 - protein, 208 aa, Artificial Sequence
  Synthetic sequence
  VARIANT (31)..(31): The amino acid at position 31 is any amino acid other than Tyr. In some cases, it is Ala.
VIHVTKEVKEVATLSCGHNVSVEELAQTRIXWQKEKKMVLTMMSGDMNIWPEYKNRTIFDITNNLSIVILALRPSDEGTYECVVLKYEKDAFKREHLAEVTLSVKADFPTPSISDFEIPTSNIRRIICSTSGGFPEPHLSWLENGEELNAINTTVSQDPETELYAVSSKLDFNMTTNHSFMCLIKYGHLRVNQTFNWNTTKQEHFPDN

SEQ ID NO: 121 - protein, 208 aa, Artificial Sequence
  Synthetic sequence
  VARIANT (33)..(33): The amino acid at position 33 is any amino acid other than Gln. In some cases, it is Ala.
VIHVTKEVKEVATLSCGHNVSVEELAQTRIYWXKEKKMVLTMMSGDMNIWPEYKNRTIFDITNNLSIVILALRPSDEGTYECVVLKYEKDAFKREHLAEVTLSVKADFPTPSISDFEIPTSNIRRIICSTSGGFPEPHLSWLENGEELNAINTTVSQDPETELYAVSSKLDFNMTTNHSFMCLIKYGHLRVNQTFNWNTTKQEHFPDN

SEQ ID NO: 122 - protein, 208 aa, Artificial Sequence
  Synthetic sequence
  VARIANT (38)..(38): The amino acid at position 38 is any amino acid other than Met. In some cases, it is Ala.
VIHVTKEVKEVATLSCGHNVSVEELAQTRIYWQKEKKXVLTMMSGDMNIWPEYKNRTIFDITNNLSIVILALRPSDEGTYECVVLKYEKDAFKREHLAEVTLSVKADFPTPSISDFEIPTSNIRRIICSTSGGFPEPHLSWLENGEELNAINTTVSQDPETELYAVSSKLDFNMTTNHSFMCLIKYGHLRVNQTFNWNTTKQEHFPDN

SEQ ID NO: 123 - protein, 208 aa, Artificial Sequence
  Synthetic sequence
  VARIANT (39)..(39): The amino acid at position 39 is any amino acid other than Val. In some cases, it is Ala.
VIHVTKEVKEVATLSCGHNVSVEELAQTRIYWQKEKKMXLTMMSGDMNIWPEYKNRTIFDITNNLSIVILALRPSDEGTYECVVLKYEKDAFKREHLAEVTLSVKADFPTPSISDFEIPTSNIRRIICSTSGGFPEPHLSWLENGEELNAINTTVSQDPETELYAVSSKLDFNMTTNHSFMCLIKYGHLRVNQTFNWNTTKQEHFPDN

SEQ ID NO: 124 - protein, 208 aa, Artificial Sequence
  Synthetic sequence
  VARIANT (49)..(49): The amino acid at position 49 is any amino acid other than Ile. In some cases, it is Ala.
VIHVTKEVKEVATLSCGHNVSVEELAQTRIYWQKEKKMVLTMMSGDMNXWPEYKNRTIFDITNNLSIVILALRPSDEGTYECVVLKYEKDAFKREHLAEVTLSVKADFPTPSISDFEIPTSNIRRIICSTSGGFPEPHLSWLENGEELNAINTTVSQDPETELYAVSSKLDFNMTTNHSFMCLIKYGHLRVNQTFNWNTTKQEHFPDN

SEQ ID NO: 125 - protein, 208 aa, Artificial Sequence
  Synthetic sequence
  VARIANT (53)..(53): The amino acid at position 53 is any amino acid other than Tyr. In some cases, it is Ala.
VIHVTKEVKEVATLSCGHNVSVEELAQTRIYWQKEKKMVLTMMSGDMNIWPEXKNRTIFDITNNLSIVILALRPSDEGTYECVVLKYEKDAFKREHLAEVTLSVKADFPTPSISDFEIPTSNIRRIICSTSGGFPEPHLSWLENGEELNAINTTVSQDPETELYAVSSKLDFNMTTNHSFMCLIKYGHLRVNQTFNWNTTKQEHFPDN

SEQ ID NO: 126 - protein, 208 aa, Artificial Sequence
  Synthetic sequence
  VARIANT (60)..(60): The amino acid at position 60 is any amino acid other than Asp. In some cases, it is Ala.
VIHVTKEVKEVATLSCGHNVSVEELAQTRIYWQKEKKMVLTMMSGDMNIWPEYKNRTIFXITNNLSIVILALRPSDEGTYECVVLKYEKDAFKREHLAEVTLSVKADFPTPSISDFEIPTSNIRRIICSTSGGFPEPHLSWLENGEELNAINTTVSQDPETELYAVSSKLDFNMTTNHSFMCLIKYGHLRVNQTFNWNTTKQEHFPDN

SEQ ID NO: 127 - protein, 208 aa, Artificial Sequence
  Synthetic sequence
  VARIANT (108)..(108): The amino acid at position 108 is any amino acid other than Phe. In some cases, it is Ala.
VIHVTKEVKEVATLSCGHNVSVEELAQTRIYWQKEKKMVLTMMSGDMNIWPEYKNRTIFDITNNLSIVILALRPSDEGTYECVVLKYEKDAFKREHLAEVTLSVKADXPTPSISDFEIPTSNIRRIICSTSGGFPEPHLSWLENGEELNAINTTVSQDPETELYAVSSKLDFNMTTNHSFMCLIKYGHLRVNQTFNWNTTKQEHFPDN

SEQ ID NO: 128 - protein, 208 aa, Artificial Sequence
  Synthetic sequence
  VARIANT (156)..(156): The amino acid at position 156 is any amino acid other than Ser. In some cases, it is Ala.
VIHVTKEVKEVATLSCGHNVSVEELAQTRIYWQKEKKMVLTMMSGDMNIWPEYKNRTIFDITNNLSIVILALRPSDEGTYECVVLKYEKDAFKREHLAEVTLSVKADFPTPSISDFEIPTSNIRRIICSTSGGFPEPHLSWLENGEELNAINTTVXQDPETELYAVSSKLDFNMTTNHSFMCLIKYGHLRVNQTFNWNTTKQEHFPDN

SEQ ID NO: 129 - protein, 208 aa, Artificial Sequence
  Synthetic sequence
  VARIANT (111)..(111): The amino acid at position 111 is any amino acid other than Pro. In some cases, it is Ala.
VIHVTKEVKEVATLSCGHNVSVEELAQTRIYWQKEKKMVLTMMSGDMNIWPEYKNRTIFDITNNLSIVILALRPSDEGTYECVVLKYEKDAFKREHLAEVTLSVKADFPTXSISDFEIPTSNIRRIICSTSGGFPEPHLSWLENGEELNAINTTVSQDPETELYAVSSKLDFNMTTNHSFMCLIKYGHLRVNQTFNWNTTKQEHFPDN

SEQ ID NO: 130 - protein, 224 aa, Homo sapiens
APLKIQAYFNETADLPCQFANSQNQSLSELVVFWQDQENLVLNEVYLGKEKFDSVHSKYMNRTSFDSDSWTLRLHNLQIKDKGLYQCIIHHKKPTGMIRIHQMNSELSVLANFSQPEIVPISNITENVYINLTCSSIHGYPEPKKMSVLLRTKNSTIEYDGIMQKSQDNVTELYDVSISLSVSFPDVTSNMTIFCILETDKTRLLSSPFSIELEDPQPPPDHIP

SEQ ID NO: 131 - protein, 110 aa, Homo sapiens
APLKIQAYFNETADLPCQFANSQNQSLSELVVFWQDQENLVLNEVYLGKEKFDSVHSKYMNRTSFDSDSWTLRLHNLQIKDKGLYQCIIHHKKPTGMIRIHQMNSELSVL

SEQ ID NO: 132 - protein, 224 aa, Artificial Sequence
  Synthetic sequence
  VARIANT (61)..(61): The amino acid at position 61 is any amino acid other than Asn. In some cases, it is Ala.
APLKIQAYFNETADLPCQFANSQNQSLSELVVFWQDQENLVLNEVYLGKEKFDSVHSKYMXRTSFDSDSWTLRLHNLQIKDKGLYQCIIHHKKPTGMIRIHQMNSELSVLANFSQPEIVPISNITENVYINLTCSSIHGYPEPKKMSVLLRTKNSTIEYDGIMQKSQDNVTELYDVSISLSVSFPDVTSNMTIFCILETDKTRLLSSPFSIELEDPQPPPDHIP

SEQ ID NO: 133 - protein, 224 aa, Artificial Sequence
  Synthetic sequence
  VARIANT (66)..(66): The amino acid at position 66 is any amino acid other than Asp. In some cases, it is Ala.
APLKIQAYFNETADLPCQFANSQNQSLSELVVFWQDQENLVLNEVYLGKEKFDSVHSKYMNRTSFXSDSWTLRLHNLQIKDKGLYQCIIHHKKPTGMIRIHQMNSELSVLANFSQPEIVPISNITENVYINLTCSSIHGYPEPKKMSVLLRTKNSTIEYDGIMQKSQDNVTELYDVSISLSVSFPDVTSNMTIFCILETDKTRLLSSPFSIELEDPQPPPDHIP

SEQ ID NO: 134 - protein, 224 aa, Artificial Sequence
  Synthetic sequence
  VARIANT (70)..(70): The amino acid at position 70 is any amino acid other than Trp. In some cases, it is Ala.
APLKIQAYFNETADLPCQFANSQNQSLSELVVFWQDQENLVLNEVYLGKEKFDSVHSKYMNRTSFDSDSXTLRLHNLQIKDKGLYQCIIHHKKPTGMIRIHQMNSELSVLANFSQPEIVPISNITENVYINLTCSSIHGYPEPKKMSVLLRTKNSTIEYDGIMQKSQDNVTELYDVSISLSVSFPDVTSNMTIFCILETDKTRLLSSPFSIELEDPQPPPDHIP

SEQ ID NO: 135 - protein, 224 aa, Artificial Sequence
  Synthetic sequence
  VARIANT (91)..(91): The amino acid at position 91 is any amino acid other than His. In some cases, it is Ala.
APLKIQAYFNETADLPCQFANSQNQSLSELVVFWQDQENLVLNEVYLGKEKFDSVHSKYMNRTSFDSDSWTLRLHNLQIKDKGLYQCIIHXKKPTGMIRIHQMNSELSVLANFSQPEIVPISNITENVYINLTCSSIHGYPEPKKMSVLLRTKNSTIEYDGIMQKSQDNVTELYDVSISLSVSFPDVTSNMTIFCILETDKTRLLSSPFSIELEDPQPPPDHIP

SEQ ID NO: 136 - protein, 110 aa, Artificial Sequence
  Synthetic sequence
  VARIANT (61)..(61): The amino acid at position 61 is any amino acid other than Asn. In some cases, it is Ala.
APLKIQAYFNETADLPCQFANSQNQSLSELVVFWQDQENLVLNEVYLGKEKFDSVHSKYMXRTSFDSDSWTLRLHNLQIKDKGLYQCIIHHKKPTGMIRIHQMNSELSVL

SEQ ID NO: 137 - protein, 110 aa, Artificial Sequence
  Synthetic sequence
  VARIANT (66)..(66): The amino acid at position 66 is any amino acid other than Asp. In some cases, it is Ala.
APLKIQAYFNETADLPCQFANSQNQSLSELVVFWQDQENLVLNEVYLGKEKFDSVHSKYMNRTSFXSDSWTLRLHNLQIKDKGLYQCIIHHKKPTGMIRIHQMNSELSVL

SEQ ID NO: 138 - protein, 110 aa, Artificial Sequence
  Synthetic sequence
  VARIANT (70)..(70): The amino acid at position 70 is any amino acid other than Trp. In some cases, it is Ala.
APLKIQAYFNETADLPCQFANSQNQSLSELVVFWQDQENLVLNEVYLGKEKFDSVHSKYMNRTSFDSDSXTLRLHNLQIKDKGLYQCIIHHKKPTGMIRIHQMNSELSVL

SEQ ID NO: 139 - protein, 110 aa, Artificial Sequence
  Synthetic sequence
  VARIANT (91)..(91): The amino acid at position 91 is any amino acid other than His. In some cases, it is Ala.
APLKIQAYFNETADLPCQFANSQNQSLSELVVFWQDQENLVLNEVYLGKEKFDSVHSKYMNRTSFDSDSWTLRLHNLQIKDKGLYQCIIHXKKPTGMIRIHQMNSELSVL

SEQ ID NO: 140 - protein, 224 aa, Artificial Sequence
  Synthetic sequence
  VARIANT (41)..(41): The amino acid at position 41 is any amino acid other than Val. In some cases, it is Ala.
APLKIQAYFNETADLPCQFANSQNQSLSELVVFWQDQENLXLNEVYLGKEKFDSVHSKYMNRTSFDSDSWTLRLHNLQIKDKGLYQCIIHHKKPTGMIRIHQMNSELSVLANFSQPEIVPISNITENVYINLTCSSIHGYPEPKKMSVLLRTKNSTIEYDGIMQKSQDNVTELYDVSISLSVSFPDVTSNMTIFCILETDKTRLLSSPFSIELEDPQPPPDHIP

SEQ ID NO: 141 - protein, 110 aa, Artificial Sequence
  Synthetic sequence
  VARIANT (41)..(41): The amino acid at position 41 is any amino acid other than Val. In some cases, it is Ala.
APLKIQAYFNETADLPCQFANSQNQSLSELVVFWQDQENLXLNEVYLGKEKFDSVHSKYMNRTSFDSDSWTLRLHNLQIKDKGLYQCIIHHKKPTGMIRIHQMNSELSVL

SEQ ID NO: 142 - protein, 224 aa, Artificial Sequence
  Synthetic sequence
  VARIANT (35)..(35): The amino acid at position 35 is any amino acid other than Gln. In some cases, it is Ala.
APLKIQAYFNETADLPCQFANSQNQSLSELVVFWXDQENLVLNEVYLGKEKFDSVHSKYMNRTSFDSDSWTLRLHNLQIKDKGLYQCIIHHKKPTGMIRIHQMNSELSVLANFSQPEIVPISNITENVYINLTCSSIHGYPEPKKMSVLLRTKNSTIEYDGIMQKSQDNVTELYDVSISLSVSFPDVTSNMTIFCILETDKTRLLSSPFSIELEDPQPPPDHIP

SEQ ID NO: 143 - protein, 110 aa, Artificial Sequence
  Synthetic sequence
  VARIANT (35)..(35): The amino acid at position 35 is any amino acid other than Gln. In some cases, it is Ala.
APLKIQAYFNETADLPCQFANSQNQSLSELVVFWXDQENLVLNEVYLGKEKFDSVHSKYMNRTSFDSDSWTLRLHNLQIKDKGLYQCIIHHKKPTGMIRIHQMNSELSVL

SEQ ID NO: 144 - protein, 224 aa, Artificial Sequence
  Synthetic sequence
  VARIANT (33)..(33): The amino acid at paragraph 33 is any amino acid other than Phe. In some cases, it is Ala.
APLKIQAYFNETADLPCQFANSQNQSLSELVVXWQDQENLVLNEVYLGKEKFDSVHSKYMNRTSFDSDSWTLRLHNLQIKDKGLYQCIIHHKKPTGMIRIHQMNSELSVLANFSQPEIVPISNITENVYINLTCSSIHGYPEPKKMSVLLRTKNSTIEYDGIMQKSQDNVTELYDVSISLSVSFPDVTSNMTIFCILETDKTRLLSSPFSIELEDPQPPPDHIP

SEQ ID NO: 145 - protein, 110 aa, Artificial Sequence
  Synthetic sequence
  VARIANT (33)..(33): The amino acid at position 33 is any amino acid other than Phe. In some cases, it is Ala.
APLKIQAYFNETADLPCQFANSQNQSLSELVVXWQDQENLVLNEVYLGKEKFDSVHSKYMNRTSFDSDSWTLRLHNLQIKDKGLYQCIIHHKKPTGMIRIHQMNSELSVL

SEQ ID NO: 146 - protein, 224 aa, Artificial Sequence
  Synthetic sequence
  VARIANT (72)..(72): The amino acid at position 72 is any amino acid other than Leu. In some cases, it is Ala.
APLKIQAYFNETADLPCQFANSQNQSLSELVVFWQDQENLVLNEVYLGKEKFDSVHSKYMNRTSFDSDSWTXRLHNLQIKDKGLYQCIIHHKKPTGMIRIHQMNSELSVLANFSQPEIVPISNITENVYINLTCSSIHGYPEPKKMSVLLRTKNSTIEYDGIMQKSQDNVTELYDVSISLSVSFPDVTSNMTIFCILETDKTRLLSSPFSIELEDPQPPPDHIP

SEQ ID NO: 147 - protein, 110 aa, Artificial Sequence
  Synthetic sequence
  VARIANT (72)..(72): The amino acid at position 72 is any amino acid other than Leu. In some cases, it is Ala.
APLKIQAYFNETADLPCQFANSQNQSLSELVVFWQDQENLVLNEVYLGKEKFDSVHSKYMNRTSFDSDSWTXRLHNLQIKDKGLYQCIIHHKKPTGMIRIHQMNSELSVL

SEQ ID NO: 148 - protein, 224 aa, Artificial Sequence
  Synthetic sequence
  VARIANT (59)..(59): The amino acid at position 59 is any amino acid other than Tyr. In some cases, it is Ala.
APLKIQAYFNETADLPCQFANSQNQSLSELVVFWQDQENLVLNEVYLGKEKFDSVHSKXMNRTSFDSDSWTLRLHNLQIKDKGLYQCIIHHKKPTGMIRIHQMNSELSVLANFSQPEIVPISNITENVYINLTCSSIHGYPEPKKMSVLLRTKNSTIEYDGIMQKSQDNVTELYDVSISLSVSFPDVTSNMTIFCILETDKTRLLSSPFSIELEDPQPPPDHIP

SEQ ID NO: 149 - protein, 110 aa, Artificial Sequence
  Synthetic sequence
  VARIANT (59)..(59): The amino acid at position 59 is any amino acid other than Tyr. In some cases, it is Ala.
APLKIQAYFNETADLPCQFANSQNQSLSELVVFWQDQENLVLNEVYLGKEKFDSVHSKXMNRTSFDSDSWTLRLHNLQIKDKGLYQCIIHHKKPTGMIRIHQMNSELSVL

SEQ ID NO: 150 - protein, 224 aa, Artificial Sequence
  Synthetic sequence
  VARIANT (61)..(61): The amino acid at position 61 is any amino acid other than Asn. In some cases, it is Ala.
  VARIANT (91)..(91): The amino acid at position 91 is any amino acid other than His. In some cases, it is Ala.
APLKIQAYFNETADLPCQFANSQNQSLSELVVFWQDQENLVLNEVYLGKEKFDSVHSKYMXRTSFDSDSWTLRLHNLQIKDKGLYQCIIHXKKPTGMIRIHQMNSELSVLANFSQPEIVPISNITENVYINLTCSSIHGYPEPKKMSVLLRTKNSTIEYDGIMQKSQDNVTELYDVSISLSVSFPDVTSNMTIFCILETDKTRLLSSPFSIELEDPQPPPDHIP

SEQ ID NO: 151 - protein, 110 aa, Artificial Sequence
  Synthetic sequence
  VARIANT (61)..(61): The amino acid at position 61 is any amino acid other than Asn. In some cases, it is Ala.
  VARIANT (91)..(91): The amino acid at position 91 is any amino acid other than His. In some cases, it is Ala.
APLKIQAYFNETADLPCQFANSQNQSLSELVVFWQDQENLVLNEVYLGKEKFDSVHSKYMXRTSFDSDSWTLRLHNLQIKDKGLYQCIIHXKKPTGMIRIHQMNSELSVL

SEQ ID NO: 152 - protein, 224 aa, Artificial Sequence
  Synthetic sequence
  VARIANT (66)..(66): The amino acid at position 66 is any amino acid other than Asp. In some cases, it is Ala.
  VARIANT (91)..(91): The amino acid at position 91 is any amino acid other than His. In some cases, it is Ala.
APLKIQAYFNETADLPCQFANSQNQSLSELVVFWQDQENLVLNEVYLGKEKFDSVHSKYMNRTSFXSDSWTLRLHNLQIKDKGLYQCIIHXKKPTGMIRIHQMNSELSVLANFSQPEIVPISNITENVYINLTCSSIHGYPEPKKMSVLLRTKNSTIEYDGIMQKSQDNVTELYDVSISLSVSFPDVTSNMTIFCILETDKTRLLSSPFSIELEDPQPPPDHIP

SEQ ID NO: 153 - protein, 110 aa, Artificial Sequence
  Synthetic sequence
  VARIANT (66)..(66): The amino acid at position 66 is any amino acid other than Asn. In some cases, it is Ala.
  VARIANT (91)..(91): The amino acid at position 66 is any amino acid other than His. In some cases, it is Ala.
APLKIQAYFNETADLPCQFANSQNQSLSELVVFWQDQENLVLNEVYLGKEKFDSVHSKYMNRTSFXSDSWTLRLHNLQIKDKGLYQCIIHXKKPTGMIRIHQMNSELSVL

SEQ ID NO: 154 - protein, 224 aa, Artificial Sequence
  Synthetic sequence
  VARIANT (61)..(61): The amino acid at position 61 is any amino acid other than Asn. In some cases, it is Ala.
  VARIANT (66)..(66): The amino acid at position 61 is any amino acid other than Asp. In some cases, it is Ala.
  VARIANT (91)..(91): The amino acid at position 61 is any amino acid other than His. In some cases, it is Ala.
APLKIQAYFNETADLPCQFANSQNQSLSELVVFWQDQENLVLNEVYLGKEKFDSVHSKYMXRTSFXSDSWTLRLHNLQIKDKGLYQCIIHXKKPTGMIRIHQMNSELSVLANFSQPEIVPISNITENVYINLTCSSIHGYPEPKKMSVLLRTKNSTIEYDGIMQKSQDNVTELYDVSISLSVSFPDVTSNMTIFCILETDKTRLLSSPFSIELEDPQPPPDHIP

SEQ ID NO: 155 - protein, 110 aa, Artificial Sequence
  Synthetic sequence
  VARIANT (61)..(61): The amino acid at position 61 is any amino acid other than Asn. In some cases, it is Ala.
  VARIANT (66)..(66): The amino acid at position 66 is any amino acid other than Asp. In some cases, it is Ala.
  VARIANT (91)..(91): The amino acid at position 66 is any amino acid other than His. In some cases, it is Ala.
APLKIQAYFNETADLPCQFANSQNQSLSELVVFWQDQENLVLNEVYLGKEKFDSVHSKYMXRTSFXSDSWTLRLHNLQIKDKGLYQCIIHXKKPTGMIRIHQMNSELSVL

SEQ ID NO: 156 - protein, 254 aa, Homo sapiens
MEYASDASLDPEAPWPPAPRARACRVLPWALVAGLLLLLLLAAACAVFLACPWAVSGARASPGSAASPRLREGPELSPDDPAGLLDLRQGMFAQLVAQNVLLIDGPLSWYSDPGLAGVSLTGGLSYKEDTKELVVAKAGVYYVFFQLELRRVVAGEGSGSVSLALHLQPLRSAAGAAALALTVDLPPASSEARNSAFGFQGRLLHLSAGQRLGVHLHTEARARHAWQLTQGATVLGLFRVTPEIPAGLPSPRSE

SEQ ID NO: 157 - protein, 174 aa, Homo sapiens
PAGLLDLRQGMFAQLVAQNVLLIDGPLSWYSDPGLAGVSLTGGLSYKEDTKELVVAKAGVYYVFFQLELRRVVAGEGSGSVSLALHLQPLRSAAGAAALALTVDLPPASSEARNSAFGFQGRLLHLSAGQRLGVHLHTEARARHAWQLTQGATVLGLFRVTPEIPAGLPSPRSE

SEQ ID NO: 158 - protein, 175 aa, Homo sapiens
DPAGLLDLRQGMFAQLVAQNVLLIDGPLSWYSDPGLAGVSLTGGLSYKEDTKELVVAKAGVYYVFFQLELRRVVAGEGSGSVSLALHLQPLRSAAGAAALALTVDLPPASSEARNSAFGFQGRLLHLSAGQRLGVHLHTEARARHAWQLTQGATVLGLFRVTPEIPAGLPSPRSE

SEQ ID NO: 159 - protein, 167 aa, Homo sapiens
DPAGLLDLRQGMFAQLVAQNVLLIDGPLSWYSDPGLAGVSLTGGLSYKEDTKELVVAKAGVYYVFFQLELRRVVAGEGSGSVSLALHLQPLRSAAGAAALALTVDLPPASSEARNSAFGFQGRLLHLSAGQRLGVHLHTEARARHAWQLTQGATVLGLFRVTPEIPA

SEQ ID NO: 160 - protein, 255 aa, Homo sapiens
MGNSCYNIVATLLLVLNFERTRSLQDPCSNCPAGTFCDNNRNQICSPCPPNSFSSAGGQRTCDICRQCKGVFRTRKECSSTSNAECDCTPGFHCLGAGCSMCEQDCKQGQELTKKGCKDCCFGTFNDQKRGICRPWTNCSLDGKSVLVNGTKERDVVCGPSPADLSPGASSVTPPAPAREPGHSPQIISFFLALTSTALLFLLFFLTLRFSVVKRGRKKLLYIFKQPFMRPVQTTQEEDGCSCRFPEEEEGGCEL

SEQ ID NO: 161 - protein, 174 aa, Artificial Sequence
  Synthetic sequence
  VARIANT (47)..(47): The amino acid at position 47 is is any amino acid other than Lys. In some cases, it is Ala.
PAGLLDLRQGMFAQLVAQNVLLIDGPLSWYSDPGLAGVSLTGGLSYXEDTKELVVAKAGVYYVFFQLELRRVVAGEGSGSVSLALHLQPLRSAAGAAALALTVDLPPASSEARNSAFGFQGRLLHLSAGQRLGVHLHTEARARHAWQLTQGATVLGLFRVTPEIPAGLPSPRSE

SEQ ID NO: 162 - protein, 174 aa, Artificial Sequence
  Synthetic sequence
  VARIANT (147)..(147): The amino acid at position 147 is any amino acid other than Gln. In some cases, it is Ala.
PAGLLDLRQGMFAQLVAQNVLLIDGPLSWYSDPGLAGVSLTGGLSYKEDTKELVVAKAGVYYVFFQLELRRVVAGEGSGSVSLALHLQPLRSAAGAAALALTVDLPPASSEARNSAFGFQGRLLHLSAGQRLGVHLHTEARARHAWXLTQGATVLGLFRVTPEIPAGLPSPRSE

SEQ ID NO: 163 - protein, 174 aa, Artificial Sequence
  Synthetic sequence
  VARIANT (11)..(11): The amino acid at position 11 is any amino acid other than Met. In some cases, it is Ala.
PAGLLDLRQGXFAQLVAQNVLLIDGPLSWYSDPGLAGVSLTGGLSYKEDTKELVVAKAGVYYVFFQLELRRVVAGEGSGSVSLALHLQPLRSAAGAAALALTVDLPPASSEARNSAFGFQGRLLHLSAGQRLGVHLHTEARARHAWQLTQGATVLGLFRVTPEIPAGLPSPRSE

SEQ ID NO: 164 - protein, 174 aa, Artificial Sequence
  Synthetic sequence
  VARIANT (12)..(12): The amino acid at position 12 is is any amino acid other than Phe. In some cases, it is Ala.
PAGLLDLRQGMXAQLVAQNVLLIDGPLSWYSDPGLAGVSLTGGLSYKEDTKELVVAKAGVYYVFFQLELRRVVAGEGSGSVSLALHLQPLRSAAGAAALALTVDLPPASSEARNSAFGFQGRLLHLSAGQRLGVHLHTEARARHAWQLTQGATVLGLFRVTPEIPAGLPSPRSE

SEQ ID NO: 165 - protein, 174 aa, Artificial Sequence
  Synthetic sequence
  VARIANT (14)..(14): The amino acid at position 14 is any amino acid other than Gln. In some cases, it is Ala.
PAGLLDLRQGMFAXLVAQNVLLIDGPLSWYSDPGLAGVSLTGGLSYKEDTKELVVAKAGVYYVFFQLELRRVVAGEGSGSVSLALHLQPLRSAAGAAALALTVDLPPASSEARNSAFGFQGRLLHLSAGQRLGVHLHTEARARHAWQLTQGATVLGLFRVTPEIPAGLPSPRSE

SEQ ID NO: 166 - protein, 174 aa, Artificial Sequence
  Synthetic sequence
  VARIANT (15)..(15): The amino acid at position 15 is any amino acid other than Leu. In some cases, it is Ala.
PAGLLDLRQGMFAQXVAQNVLLIDGPLSWYSDPGLAGVSLTGGLSYKEDTKELVVAKAGVYYVFFQLELRRVVAGEGSGSVSLALHLQPLRSAAGAAALALTVDLPPASSEARNSAFGFQGRLLHLSAGQRLGVHLHTEARARHAWQLTQGATVLGLFRVTPEIPAGLPSPRSE

SEQ ID NO: 167 - protein, 174 aa, Artificial Sequence
  Synthetic sequence
  VARIANT (16)..(16): The amino acid at position 16 is any amino acid other than Val. In some cases, it is Ala.
PAGLLDLRQGMFAQLXAQNVLLIDGPLSWYSDPGLAGVSLTGGLSYKEDTKELVVAKAGVYYVFFQLELRRVVAGEGSGSVSLALHLQPLRSAAGAAALALTVDLPPASSEARNSAFGFQGRLLHLSAGQRLGVHLHTEARARHAWQLTQGATVLGLFRVTPEIPAGLPSPRSE

SEQ ID NO: 168 - protein, 174 aa, Artificial Sequence
  Synthetic sequence
  VARIANT (18)..(18): The amino acid at position 18 is any amino acid other than Gln. In some cases, it is Ala.
PAGLLDLRQGMFAQLVAXNVLLIDGPLSWYSDPGLAGVSLTGGLSYKEDTKELVVAKAGVYYVFFQLELRRVVAGEGSGSVSLALHLQPLRSAAGAAALALTVDLPPASSEARNSAFGFQGRLLHLSAGQRLGVHLHTEARARHAWQLTQGATVLGLFRVTPEIPAGLPSPRSE

SEQ ID NO: 169 - protein, 174 aa, Artificial Sequence
  Synthetic sequence
  VARIANT (19)..(19): The amino acid at position 19 is any amino acid other than Asn. In some cases, it is Ala.
PAGLLDLRQGMFAQLVAQXVLLIDGPLSWYSDPGLAGVSLTGGLSYKEDTKELVVAKAGVYYVFFQLELRRVVAGEGSGSVSLALHLQPLRSAAGAAALALTVDLPPASSEARNSAFGFQGRLLHLSAGQRLGVHLHTEARARHAWQLTQGATVLGLFRVTPEIPAGLPSPRSE

SEQ ID NO: 170 - protein, 174 aa, Artificial Sequence
  Synthetic sequence
  VARIANT (20)..(20): The amino acid at position 20 is any amino acid other than Val. In some cases, it is Ala.
PAGLLDLRQGMFAQLVAQNXLLIDGPLSWYSDPGLAGVSLTGGLSYKEDTKELVVAKAGVYYVFFQLELRRVVAGEGSGSVSLALHLQPLRSAAGAAALALTVDLPPASSEARNSAFGFQGRLLHLSAGQRLGVHLHTEARARHAWQLTQGATVLGLFRVTPEIPAGLPSPRSE

SEQ ID NO: 171 - protein, 174 aa, Artificial Sequence
  Synthetic sequence
  VARIANT (21)..(21): The amino acid at position 21 is any amino acid other than Leu. In some cases, it is Ala.
PAGLLDLRQGMFAQLVAQNVXLIDGPLSWYSDPGLAGVSLTGGLSYKEDTKELVVAKAGVYYVFFQLELRRVVAGEGSGSVSLALHLQPLRSAAGAAALALTVDLPPASSEARNSAFGFQGRLLHLSAGQRLGVHLHTEARARHAWQLTQGATVLGLFRVTPEIPAGLPSPRSE

SEQ ID NO: 172 - protein, 174 aa, Artificial Sequence
  Synthetic sequence
  VARIANT (22)..(22): The amino acid at position 22 is any amino acid other than Leu. In some cases, it is Ala.
PAGLLDLRQGMFAQLVAQNVLXIDGPLSWYSDPGLAGVSLTGGLSYKEDTKELVVAKAGVYYVFFQLELRRVVAGEGSGSVSLALHLQPLRSAAGAAALALTVDLPPASSEARNSAFGFQGRLLHLSAGQRLGVHLHTEARARHAWQLTQGATVLGLFRVTPEIPAGLPSPRSE

SEQ ID NO: 173 - protein, 174 aa, Artificial Sequence
  Synthetic sequence
  VARIANT (23)..(23): The amino acid at position 23 is any amino acid other than Ile. In some cases, it is Ala.
PAGLLDLRQGMFAQLVAQNVLLXDGPLSWYSDPGLAGVSLTGGLSYKEDTKELVVAKAGVYYVFFQLELRRVVAGEGSGSVSLALHLQPLRSAAGAAALALTVDLPPASSEARNSAFGFQGRLLHLSAGQRLGVHLHTEARARHAWQLTQGATVLGLFRVTPEIPAGLPSPRSE

SEQ ID NO: 174 - protein, 174 aa, Artificial Sequence
  Synthetic sequence
  VARIANT (24)..(24): The amino acid at position 24 is any amino acid other than Asp. In some cases, it is Ala.
PAGLLDLRQGMFAQLVAQNVLLIXGPLSWYSDPGLAGVSLTGGLSYKEDTKELVVAKAGVYYVFFQLELRRVVAGEGSGSVSLALHLQPLRSAAGAAALALTVDLPPASSEARNSAFGFQGRLLHLSAGQRLGVHLHTEARARHAWQLTQGATVLGLFRVTPEIPAGLPSPRSE

SEQ ID NO: 175 - protein, 174 aa, Artificial Sequence
  Synthetic sequence
  VARIANT (25)..(25): The amino acid at position 25 is any amino acid other than Gly. In some cases, it is Ala.
PAGLLDLRQGMFAQLVAQNVLLIDXPLSWYSDPGLAGVSLTGGLSYKEDTKELVVAKAGVYYVFFQLELRRVVAGEGSGSVSLALHLQPLRSAAGAAALALTVDLPPASSEARNSAFGFQGRLLHLSAGQRLGVHLHTEARARHAWQLTQGATVLGLFRVTPEIPAGLPSPRSE

SEQ ID NO: 176 - protein, 174 aa, Artificial Sequence
  Synthetic sequence
  VARIANT (26)..(26): The amino acid at position 26 is any amino acid other than Pro. In some cases, it is Ala.
PAGLLDLRQGMFAQLVAQNVLLIGGXLSWYSDPGLAGVSLTGGLSYKEDTKELVVAKAGVYYVFFQLELRRVVAGEGSGSVSLALHLQPLRSAAGAAALALTVDLPPASSEARNSAFGFQGRLLHLSAGQRLGVHLHTEARARHAWQLTQGATVLGLFRVTPEIPAGLPSPRSE

SEQ ID NO: 177 - protein, 174 aa, Artificial Sequence
  Synthetic sequence
  VARIANT (27)..(27): The amino acid at position 27 is any amino acid other than Leu. In some cases, it is Ala.
PAGLLDLRQGMFAQLVAQNVLLIGGPXSWYSDPGLAGVSLTGGLSYKEDTKELVVAKAGVYYVFFQLELRRVVAGEGSGSVSLALHLQPLRSAAGAAALALTVDLPPASSEARNSAFGFQGRLLHLSAGQRLGVHLHTEARARHAWQLTQGATVLGLFRVTPEIPAGLPSPRSE

SEQ ID NO: 178 - protein, 174 aa, Artificial Sequence
  Synthetic sequence
  VARIANT (28)..(28): The amino acid at position 28 is any amino acid other than Ser. In some cases, it is Ala.
PAGLLDLRQGMFAQLVAQNVLLIGGPLXWYSDPGLAGVSLTGGLSYKEDTKELVVAKAGVYYVFFQLELRRVVAGEGSGSVSLALHLQPLRSAAGAAALALTVDLPPASSEARNSAFGFQGRLLHLSAGQRLGVHLHTEARARHAWQLTQGATVLGLFRVTPEIPAGLPSPRSE

SEQ ID NO: 179 - protein, 174 aa, Artificial Sequence
  Synthetic sequence
  VARIANT (29)..(29): The amino acid at position 29 is any amino acid other than Trp. In some cases, it is Ala.
PAGLLDLRQGMFAQLVAQNVLLIGGPLSXYSDPGLAGVSLTGGLSYKEDTKELVVAKAGVYYVFFQLELRRVVAGEGSGSVSLALHLQPLRSAAGAAALALTVDLPPASSEARNSAFGFQGRLLHLSAGQRLGVHLHTEARARHAWQLTQGATVLGLFRVTPEIPAGLPSPRSE

SEQ ID NO: 180 - protein, 174 aa, Artificial Sequence
  Synthetic sequence
  VARIANT (30)..(30): The amino acid at position 30 is any amino acid other than Tyr. In some cases, it is Ala.
PAGLLDLRQGMFAQLVAQNVLLIGGPLSWXSDPGLAGVSLTGGLSYKEDTKELVVAKAGVYYVFFQLELRRVVAGEGSGSVSLALHLQPLRSAAGAAALALTVDLPPASSEARNSAFGFQGRLLHLSAGQRLGVHLHTEARARHAWQLTQGATVLGLFRVTPEIPAGLPSPRSE

SEQ ID NO: 181 - protein, 174 aa, Artificial Sequence
  Synthetic sequence
  VARIANT (31)..(31): The amino acid at position 31 is any amino acid other than Ser. In some cases, it is Ala.
PAGLLDLRQGMFAQLVAQNVLLIGGPLSWYXDPGLAGVSLTGGLSYKEDTKELVVAKAGVYYVFFQLELRRVVAGEGSGSVSLALHLQPLRSAAGAAALALTVDLPPASSEARNSAFGFQGRLLHLSAGQRLGVHLHTEARARHAWQLTQGATVLGLFRVTPEIPAGLPSPRSE

SEQ ID NO: 182 - protein, 174 aa, Artificial Sequence
  Synthetic sequence
  VARIANT (32)..(32): The amino acid at position 32 is any amino acid other than Asp. In some cases, it is Ala.
PAGLLDLRQGMFAQLVAQNVLLIGGPLSWYSXPGLAGVSLTGGLSYKEDTKELVVAKAGVYYVFFQLELRRVVAGEGSGSVSLALHLQPLRSAAGAAALALTVDLPPASSEARNSAFGFQGRLLHLSAGQRLGVHLHTEARARHAWQLTQGATVLGLFRVTPEIPAGLPSPRSE

SEQ ID NO: 183 - protein, 174 aa, Artificial Sequence
  Synthetic sequence
  VARIANT (33)..(33): The amino acid at position 33 is any amino acid other than Pro. In some cases, it is Ala.
PAGLLDLRQGMFAQLVAQNVLLIGGPLSWYSDXGLAGVSLTGGLSYKEDTKELVVAKAGVYYVFFQLELRRVVAGEGSGSVSLALHLQPLRSAAGAAALALTVDLPPASSEARNSAFGFQGRLLHLSAGQRLGVHLHTEARARHAWQLTQGATVLGLFRVTPEIPAGLPSPRSE

SEQ ID NO: 184 - protein, 174 aa, Artificial Sequence
  Synthetic sequence
  VARIANT (34)..(34): The amino acid at position 34 is any amino acid other than Gly. In some cases, it is Ala.
PAGLLDLRQGMFAQLVAQNVLLIGGPLSWYSDPXLAGVSLTGGLSYKEDTKELVVAKAGVYYVFFQLELRRVVAGEGSGSVSLALHLQPLRSAAGAAALALTVDLPPASSEARNSAFGFQGRLLHLSAGQRLGVHLHTEARARHAWQLTQGATVLGLFRVTPEIPAGLPSPRSE

SEQ ID NO: 185 - protein, 174 aa, Artificial Sequence
  Synthetic sequence
  VARIANT (35)..(35): The amino acid at position 35 is any amino acid other than Leu. In some cases, it is Ala.
PAGLLDLRQGMFAQLVAQNVLLIGGPLSWYSDPGXAGVSLTGGLSYKEDTKELVVAKAGVYYVFFQLELRRVVAGEGSGSVSLALHLQPLRSAAGAAALALTVDLPPASSEARNSAFGFQGRLLHLSAGQRLGVHLHTEARARHAWQLTQGATVLGLFRVTPEIPAGLPSPRSE

SEQ ID NO: 186 - protein, 174 aa, Artificial Sequence
  Synthetic sequence
  VARIANT (37)..(37): The amino acid at position 37 is any amino acid other than Gly. In some cases, it is Ala.
PAGLLDLRQGMFAQLVAQNVLLIGGPLSWYSDPGLAXVSLTGGLSYKEDTKELVVAKAGVYYVFFQLELRRVVAGEGSGSVSLALHLQPLRSAAGAAALALTVDLPPASSEARNSAFGFQGRLLHLSAGQRLGVHLHTEARARHAWQLTQGATVLGLFRVTPEIPAGLPSPRSE

SEQ ID NO: 187 - protein, 174 aa, Artificial Sequence
  Synthetic sequence
  VARIANT (38)..(38): The amino acid at position 38 is any amino acid other than Val. In some cases, it is Ala.
PAGLLDLRQGMFAQLVAQNVLLIGGPLSWYSDPGLAGXSLTGGLSYKEDTKELVVAKAGVYYVFFQLELRRVVAGEGSGSVSLALHLQPLRSAAGAAALALTVDLPPASSEARNSAFGFQGRLLHLSAGQRLGVHLHTEARARHAWQLTQGATVLGLFRVTPEIPAGLPSPRSE

SEQ ID NO: 188 - protein, 174 aa, Artificial Sequence
  Synthetic sequence
  VARIANT (39)..(39): The amino acid at position 39 is any amino acid other than Val. In some cases, it is Ala.
PAGLLDLRQGMFAQLVAQNVLLIGGPLSWYSDPGLAGVXLTGGLSYKEDTKELVVAKAGVYYVFFQLELRRVVAGEGSGSVSLALHLQPLRSAAGAAALALTVDLPPASSEARNSAFGFQGRLLHLSAGQRLGVHLHTEARARHAWQLTQGATVLGLFRVTPEIPAGLPSPRSE

SEQ ID NO: 189 - protein, 174 aa, Artificial Sequence
  Synthetic sequence
  VARIANT (40)..(40): The amino acid at position 40 is any amino acid other than Leu. In some cases, it is Ala.
PAGLLDLRQGMFAQLVAQNVLLIGGPLSWYSDPGLAGVSXTGGLSYKEDTKELVVAKAGVYYVFFQLELRRVVAGEGSGSVSLALHLQPLRSAAGAAALALTVDLPPASSEARNSAFGFQGRLLHLSAGQRLGVHLHTEARARHAWQLTQGATVLGLFRVTPEIPAGLPSPRSE

SEQ ID NO: 190 - protein, 174 aa, Artificial Sequence
  Synthetic sequence
  VARIANT (41)..(41): The amino acid at position 41 is any amino acid other than Thr. In some cases, it is Ala.
PAGLLDLRQGMFAQLVAQNVLLIGGPLSWYSDPGLAGVSLXGGLSYKEDTKELVVAKAGVYYVFFQLELRRVVAGEGSGSVSLALHLQPLRSAAGAAALALTVDLPPASSEARNSAFGFQGRLLHLSAGQRLGVHLHTEARARHAWQLTQGATVLGLFRVTPEIPAGLPSPRSE

SEQ ID NO: 191 - protein, 174 aa, Artificial Sequence
  Synthetic sequence
  VARIANT (42)..(42): The amino acid at position 42 is any amino acid other than Gly. In some cases, it is Ala.
PAGLLDLRQGMFAQLVAQNVLLIGGPLSWYSDPGLAGVSLTXGLSYKEDTKELVVAKAGVYYVFFQLELRRVVAGEGSGSVSLALHLQPLRSAAGAAALALTVDLPPASSEARNSAFGFQGRLLHLSAGQRLGVHLHTEARARHAWQLTQGATVLGLFRVTPEIPAGLPSPRSE

SEQ ID NO: 192 - protein, 174 aa, Artificial Sequence
  Synthetic sequence
  VARIANT (43)..(43): The amino acid at position 43 is any amino acid other than Gly. In some cases, it is Ala.
PAGLLDLRQGMFAQLVAQNVLLIGGPLSWYSDPGLAGVSLTGXLSYKEDTKELVVAKAGVYYVFFQLELRRVVAGEGSGSVSLALHLQPLRSAAGAAALALTVDLPPASSEARNSAFGFQGRLLHLSAGQRLGVHLHTEARARHAWQLTQGATVLGLFRVTPEIPAGLPSPRSE

SEQ ID NO: 193 - protein, 174 aa, Artificial Sequence
  Synthetic sequence
  VARIANT (44)..(44): The amino acid at position 44 is any amino acid other than Leu. In some cases, it is Ala.
PAGLLDLRQGMFAQLVAQNVLLIGGPLSWYSDPGLAGVSLTGGXSYKEDTKELVVAKAGVYYVFFQLELRRVVAGEGSGSVSLALHLQPLRSAAGAAALALTVDLPPASSEARNSAFGFQGRLLHLSAGQRLGVHLHTEARARHAWQLTQGATVLGLFRVTPEIPAGLPSPRSE

SEQ ID NO: 194 - protein, 174 aa, Artificial Sequence
  Synthetic sequence
  VARIANT (45)..(45): The amino acid at position 45 is any amino acid other than Ser. In some cases, it is Ala.
PAGLLDLRQGMFAQLVAQNVLLIGGPLSWYSDPGLAGVSLTGGLXYKEDTKELVVAKAGVYYVFFQLELRRVVAGEGSGSVSLALHLQPLRSAAGAAALALTVDLPPASSEARNSAFGFQGRLLHLSAGQRLGVHLHTEARARHAWQLTQGATVLGLFRVTPEIPAGLPSPRSE

SEQ ID NO: 195 - protein, 174 aa, Artificial Sequence
  Synthetic sequence
  VARIANT (46)..(46): The amino acid at position 46 is any amino acid other than Tyr. In some cases, it is Ala.
PAGLLDLRQGMFAQLVAQNVLLIGGPLSWYSDPGLAGVSLTGGLSXKEDTKELVVAKAGVYYVFFQLELRRVVAGEGSGSVSLALHLQPLRSAAGAAALALTVDLPPASSEARNSAFGFQGRLLHLSAGQRLGVHLHTEARARHAWQLTQGATVLGLFRVTPEIPAGLPSPRSE

SEQ ID NO: 196 - protein, 174 aa, Artificial Sequence
  Synthetic sequence
  VARIANT (48)..(48): The amino acid at position 48 is any amino acid other than Glu. In some cases, it is Ala.
PAGLLDLRQGMFAQLVAQNVLLIGGPLSWYSDPGLAGVSLTGGLSYKXDTKELVVAKAGVYYVFFQLELRRVVAGEGSGSVSLALHLQPLRSAAGAAALALTVDLPPASSEARNSAFGFQGRLLHLSAGQRLGVHLHTEARARHAWQLTQGATVLGLFRVTPEIPAGLPSPRSE

SEQ ID NO: 197 - protein, 174 aa, Artificial Sequence
  Synthetic sequence
  VARIANT (49)..(49): The amino acid at position 49 is any amino acid other than Asp. In some cases, it is Ala.
PAGLLDLRQGMFAQLVAQNVLLIGGPLSWYSDPGLAGVSLTGGLSYKEXTKELVVAKAGVYYVFFQLELRRVVAGEGSGSVSLALHLQPLRSAAGAAALALTVDLPPASSEARNSAFGFQGRLLHLSAGQRLGVHLHTEARARHAWQLTQGATVLGLFRVTPEIPAGLPSPRSE

SEQ ID NO: 198 - protein, 174 aa, Artificial Sequence
  Synthetic sequence
  VARIANT (50)..(50): The amino acid at position 50 is any amino acid other than Thr. In some cases, it is Ala.
PAGLLDLRQGMFAQLVAQNVLLIGGPLSWYSDPGLAGVSLTGGLSYKEDXKELVVAKAGVYYVFFQLELRRVVAGEGSGSVSLALHLQPLRSAAGAAALALTVDLPPASSEARNSAFGFQGRLLHLSAGQRLGVHLHTEARARHAWQLTQGATVLGLFRVTPEIPAGLPSPRSE

SEQ ID NO: 199 - protein, 174 aa, Artificial Sequence
  Synthetic sequence
  VARIANT (51)..(51): The amino acid at position 51 is any amino acid other than Lys. In some cases, it is Ala.
PAGLLDLRQGMFAQLVAQNVLLIGGPLSWYSDPGLAGVSLTGGLSYKEDTXELVVAKAGVYYVFFQLELRRVVAGEGSGSVSLALHLQPLRSAAGAAALALTVDLPPASSEARNSAFGFQGRLLHLSAGQRLGVHLHTEARARHAWQLTQGATVLGLFRVTPEIPAGLPSPRSE

SEQ ID NO: 200 - protein, 174 aa, Artificial Sequence
  Synthetic sequence
  VARIANT (52)..(52): The amino acid at position 52 is any amino acid other than Glu. In some cases, it is Ala.
PAGLLDLRQGMFAQLVAQNVLLIGGPLSWYSDPGLAGVSLTGGLSYKEDTKXLVVAKAGVYYVFFQLELRRVVAGEGSGSVSLALHLQPLRSAAGAAALALTVDLPPASSEARNSAFGFQGRLLHLSAGQRLGVHLHTEARARHAWQLTQGATVLGLFRVTPEIPAGLPSPRSE

SEQ ID NO: 201 - protein, 174 aa, Artificial Sequence
  Synthetic sequence
  VARIANT (64)..(64): The amino acid at position 64 is any amino acid other than Phe. In some cases, it is Ala.
PAGLLDLRQGMFAQLVAQNVLLIGGPLSWYSDPGLAGVSLTGGLSYKEDTKELVVAKAGVYYVXFQLELRRVVAGEGSGSVSLALHLQPLRSAAGAAALALTVDLPPASSEARNSAFGFQGRLLHLSAGQRLGVHLHTEARARHAWQLTQGATVLGLFRVTPEIPAGLPSPRSE

SEQ ID NO: 202 - protein, 174 aa, Artificial Sequence
  Synthetic sequence
  VARIANT (65)..(65): The amino acid at position 65 is any amino acid other than Phe. In some cases, it is Ala.
PAGLLDLRQGMFAQLVAQNVLLIGGPLSWYSDPGLAGVSLTGGLSYKEDTKELVVAKAGVYYVFXQLELRRVVAGEGSGSVSLALHLQPLRSAAGAAALALTVDLPPASSEARNSAFGFQGRLLHLSAGQRLGVHLHTEARARHAWQLTQGATVLGLFRVTPEIPAGLPSPRSE

SEQ ID NO: 203 - protein, 174 aa, Artificial Sequence
  Synthetic sequence
  VARIANT (66)..(66): The amino acid at position 66 is any amino acid other than Gln. In some cases, it is Ala.
PAGLLDLRQGMFAQLVAQNVLLIGGPLSWYSDPGLAGVSLTGGLSYKEDTKELVVAKAGVYYVFFXLELRRVVAGEGSGSVSLALHLQPLRSAAGAAALALTVDLPPASSEARNSAFGFQGRLLHLSAGQRLGVHLHTEARARHAWQLTQGATVLGLFRVTPEIPAGLPSPRSE

SEQ ID NO: 204 - protein, 174 aa, Artificial Sequence
  Synthetic sequence
  VARIANT (67)..(67): The amino acid at position 67 is any amino acid other than Leu. In some cases, it is Ala.
PAGLLDLRQGMFAQLVAQNVLLIGGPLSWYSDPGLAGVSLTGGLSYKEDTKELVVAKAGVYYVFFQXELRRVVAGEGSGSVSLALHLQPLRSAAGAAALALTVDLPPASSEARNSAFGFQGRLLHLSAGQRLGVHLHTEARARHAWQLTQGATVLGLFRVTPEIPAGLPSPRSE

SEQ ID NO: 205 - protein, 174 aa, Artificial Sequence
  Synthetic sequence
  VARIANT (68)..(68): The amino acid at position 68 is any amino acid other than Glu. In some cases, it is Ala.
PAGLLDLRQGMFAQLVAQNVLLIGGPLSWYSDPGLAGVSLTGGLSYKEDTKELVVAKAGVYYVFFQLXLRRVVAGEGSGSVSLALHLQPLRSAAGAAALALTVDLPPASSEARNSAFGFQGRLLHLSAGQRLGVHLHTEARARHAWQLTQGATVLGLFRVTPEIPAGLPSPRSE

SEQ ID NO: 206 - protein, 174 aa, Artificial Sequence
  Synthetic sequence
  VARIANT (69)..(69): The amino acid at position 69 is any amino acid other than Leu. In some cases, it is Ala.
PAGLLDLRQGMFAQLVAQNVLLIGGPLSWYSDPGLAGVSLTGGLSYKEDTKELVVAKAGVYYVFFQLEXRRVVAGEGSGSVSLALHLQPLRSAAGAAALALTVDLPPASSEARNSAFGFQGRLLHLSAGQRLGVHLHTEARARHAWQLTQGATVLGLFRVTPEIPAGLPSPRSE

SEQ ID NO: 207 - protein, 174 aa, Artificial Sequence
  Synthetic sequence
  VARIANT (70)..(70): The amino acid at position 70 is any amino acid other than Arg. In some cases, it is Ala.
PAGLLDLRQGMFAQLVAQNVLLIGGPLSWYSDPGLAGVSLTGGLSYKEDTKELVVAKAGVYYVFFQLELXRVVAGEGSGSVSLALHLQPLRSAAGAAALALTVDLPPASSEARNSAFGFQGRLLHLSAGQRLGVHLHTEARARHAWQLTQGATVLGLFRVTPEIPAGLPSPRSE

SEQ ID NO: 208 - protein, 174 aa, Artificial Sequence
  Synthetic sequence
  VARIANT (71)..(71): The amino acid at position 71 is any amino acid other than Arg. In some cases, it is Ala.
PAGLLDLRQGMFAQLVAQNVLLIGGPLSWYSDPGLAGVSLTGGLSYKEDTKELVVAKAGVYYVFFQLELRXVVAGEGSGSVSLALHLQPLRSAAGAAALALTVDLPPASSEARNSAFGFQGRLLHLSAGQRLGVHLHTEARARHAWQLTQGATVLGLFRVTPEIPAGLPSPRSE

SEQ ID NO: 209 - protein, 174 aa, Artificial Sequence
  Synthetic sequence
  VARIANT (72)..(72): The amino acid at position 72 is any amino acid other than Val. In some cases, it is Ala.
PAGLLDLRQGMFAQLVAQNVLLIGGPLSWYSDPGLAGVSLTGGLSYKEDTKELVVAKAGVYYVFFQLELRRXVAGEGSGSVSLALHLQPLRSAAGAAALALTVDLPPASSEARNSAFGFQGRLLHLSAGQRLGVHLHTEARARHAWQLTQGATVLGLFRVTPEIPAGLPSPRSE

SEQ ID NO: 210 - protein, 174 aa, Artificial Sequence
  Synthetic sequence
  VARIANt (73)..(73): The amino acid at position 73 is any amino acid other than Val. In some cases, it is Ala.
PAGLLDLRQGMFAQLVAQNVLLIGGPLSWYSDPGLAGVSLTGGLSYKEDTKELVVAKAGVYYVFFQLELRRVXAGEGSGSVSLALHLQPLRSAAGAAALALTVDLPPASSEARNSAFGFQGRLLHLSAGQRLGVHLHTEARARHAWQLTQGATVLGLFRVTPEIPAGLPSPRSE

SEQ ID NO: 211 - protein, 174 aa, Artificial Sequence
  Synthetic sequence
  VARIANT (75)..(75): The amino acid at position 75 is any amino acid other than Gly. In some cases, it is Ala.
PAGLLDLRQGMFAQLVAQNVLLIGGPLSWYSDPGLAGVSLTGGLSYKEDTKELVVAKAGVYYVFFQLELRRVVAXEGSGSVSLALHLQPLRSAAGAAALALTVDLPPASSEARNSAFGFQGRLLHLSAGQRLGVHLHTEARARHAWQLTQGATVLGLFRVTPEIPAGLPSPRSE

SEQ ID NO: 212 - protein, 174 aa, Artificial Sequence
  Synthetic sequence
  VARIANT (76)..(76): The amino acid at position 76 is any amino acid other than Glu. In some cases, it is Ala.
PAGLLDLRQGMFAQLVAQNVLLIGGPLSWYSDPGLAGVSLTGGLSYKEDTKELVVAKAGVYYVFFQLELRRVVAGXGSGSVSLALHLQPLRSAAGAAALALTVDLPPASSEARNSAFGFQGRLLHLSAGQRLGVHLHTEARARHAWQLTQGATVLGLFRVTPEIPAGLPSPRSE

SEQ ID NO: 213 - protein, 174 aa, Artificial Sequence
  Synthetic sequence
  VARIANT (77)..(77): The amino acid at position 77 is any amino acid other than Gly. In some cases, it is Ala.
PAGLLDLRQGMFAQLVAQNVLLIGGPLSWYSDPGLAGVSLTGGLSYKEDTKELVVAKAGVYYVFFQLELRRVVAGEXSGSVSLALHLQPLRSAAGAAALALTVDLPPASSEARNSAFGFQGRLLHLSAGQRLGVHLHTEARARHAWQLTQGATVLGLFRVTPEIPAGLPSPRSE

SEQ ID NO: 214 - protein, 174 aa, Artificial Sequence
  Synthetic sequence
  VARIANT (78)..(78): The amino acid at position 78 is any amino acid other than Ser. In some cases, it is Ala.
PAGLLDLRQGMFAQLVAQNVLLIGGPLSWYSDPGLAGVSLTGGLSYKEDTKELVVAKAGVYYVFFQLELRRVVAGEGXGSVSLALHLQPLRSAAGAAALALTVDLPPASSEARNSAFGFQGRLLHLSAGQRLGVHLHTEARARHAWQLTQGATVLGLFRVTPEIPAGLPSPRSE

SEQ ID NO: 215 - protein, 174 aa, Artificial Sequence
  Synthetic sequence
  VARIANT (104)..(104): The amino acid at position 104 is any amino acid other than Asp. In some cases, it is Ala.
PAGLLDLRQGMFAQLVAQNVLLIGGPLSWYSDPGLAGVSLTGGLSYKEDTKELVVAKAGVYYVFFQLELRRVVAGEGSGSVSLALHLQPLRSAAGAAALALTVXLPPASSEARNSAFGFQGRLLHLSAGQRLGVHLHTEARARHAWQLTQGATVLGLFRVTPEIPAGLPSPRSE

SEQ ID NO: 216 - protein, 174 aa, Artificial Sequence
  Synthetic sequence
  VARIANT (105)..(105): The amino acid at position 105 is any amino acid other than Leu. In some cases, it is Ala.
PAGLLDLRQGMFAQLVAQNVLLIGGPLSWYSDPGLAGVSLTGGLSYKEDTKELVVAKAGVYYVFFQLELRRVVAGEGSGSVSLALHLQPLRSAAGAAALALTVDXPPASSEARNSAFGFQGRLLHLSAGQRLGVHLHTEARARHAWQLTQGATVLGLFRVTPEIPAGLPSPRSE

SEQ ID NO: 217 - protein, 174 aa, Artificial Sequence
  Synthetic sequence
  VARIANT (106)..(106): The amino acid at position 106 is any amino acid other than Pro. In some cases, it is Ala.
PAGLLDLRQGMFAQLVAQNVLLIGGPLSWYSDPGLAGVSLTGGLSYKEDTKELVVAKAGVYYVFFQLELRRVVAGEGSGSVSLALHLQPLRSAAGAAALALTVDLXPASSEARNSAFGFQGRLLHLSAGQRLGVHLHTEARARHAWQLTQGATVLGLFRVTPEIPAGLPSPRSE

SEQ ID NO: 218 - protein, 174 aa, Artificial Sequence
  Synthetic sequence
  VARIANT (109)..(109): The amino acid at position 109 is any amino acid other than Ser. In some cases, it is Ala.
PAGLLDLRQGMFAQLVAQNVLLIGGPLSWYSDPGLAGVSLTGGLSYKEDTKELVVAKAGVYYVFFQLELRRVVAGEGSGSVSLALHLQPLRSAAGAAALALTVDLPPAXSEARNSAFGFQGRLLHLSAGQRLGVHLHTEARARHAWQLTQGATVLGLFRVTPEIPAGLPSPRSE

SEQ ID NO: 219 - protein, 174 aa, Artificial Sequence
  Synthetic sequence
  VARIANT (110)..(110): The amino acid at position 110 is any amino acid other than Ser. In some cases, it is Ala.
PAGLLDLRQGMFAQLVAQNVLLIGGPLSWYSDPGLAGVSLTGGLSYKEDTKELVVAKAGVYYVFFQLELRRVVAGEGSGSVSLALHLQPLRSAAGAAALALTVDLPPASXEARNSAFGFQGRLLHLSAGQRLGVHLHTEARARHAWQLTQGATVLGLFRVTPEIPAGLPSPRSE

SEQ ID NO: 220 - protein, 174 aa, Artificial Sequence
  Synthetic sequence
  VARIANT (111)..(111): The amino acid at position 111 is is any amino acid other than Glu. In some cases, it is Ala.
PAGLLDLRQGMFAQLVAQNVLLIGGPLSWYSDPGLAGVSLTGGLSYKEDTKELVVAKAGVYYVFFQLELRRVVAGEGSGSVSLALHLQPLRSAAGAAALALTVDLPPASSXARNSAFGFQGRLLHLSAGQRLGVHLHTEARARHAWQLTQGATVLGLFRVTPEIPAGLPSPRSE

SEQ ID NO: 221 - protein, 174 aa, Artificial Sequence
  Synthetic sequence
  VARIANT (113)..(113): The amino acid at position 113 is any amino acid other than Arg. In some cases, it is Ala.
PAGLLDLRQGMFAQLVAQNVLLIGGPLSWYSDPGLAGVSLTGGLSYKEDTKELVVAKAGVYYVFFQLELRRVVAGEGSGSVSLALHLQPLRSAAGAAALALTVDLPPASSEAXNSAFGFQGRLLHLSAGQRLGVHLHTEARARHAWQLTQGATVLGLFRVTPEIPAGLPSPRSE

SEQ ID NO: 222 - protein, 174 aa, Artificial Sequence
  Synthetic sequence
  VARIANT (114)..(114): The amino acid at position 114 is any amino acid other than Asn. In some cases, it is Ala.
PAGLLDLRQGMFAQLVAQNVLLIGGPLSWYSDPGLAGVSLTGGLSYKEDTKELVVAKAGVYYVFFQLELRRVVAGEGSGSVSLALHLQPLRSAAGAAALALTVDLPPASSEARXSAFGFQGRLLHLSAGQRLGVHLHTEARARHAWQLTQGATVLGLFRVTPEIPAGLPSPRSE

SEQ ID NO: 223 - protein, 174 aa, Artificial Sequence
  Synthetic sequence
  VARIANT (115)..(115): The amino acid at position 115 is any amino acid other than Ser. In some cases, it is Ala.
PAGLLDLRQGMFAQLVAQNVLLIGGPLSWYSDPGLAGVSLTGGLSYKEDTKELVVAKAGVYYVFFQLELRRVVAGEGSGSVSLALHLQPLRSAAGAAALALTVDLPPASSEARNXAFGFQGRLLHLSAGQRLGVHLHTEARARHAWQLTQGATVLGLFRVTPEIPAGLPSPRSE

SEQ ID NO: 224 - protein, 174 aa, Artificial Sequence
  Synthetic sequence
  VARIANT (117)..(117): The amino acid at position 117 is any amino acid other than Phe. In some cases, it is Ala.
PAGLLDLRQGMFAQLVAQNVLLIGGPLSWYSDPGLAGVSLTGGLSYKEDTKELVVAKAGVYYVFFQLELRRVVAGEGSGSVSLALHLQPLRSAAGAAALALTVDLPPASSEARNSAXGFQGRLLHLSAGQRLGVHLHTEARARHAWQLTQGATVLGLFRVTPEIPAGLPSPRSE

SEQ ID NO: 225 - protein, 174 aa, Artificial Sequence
  Synthetic sequence
  VARIANT (130)..(130): The amino acid at position 130 is any amino acid other than Gln. In some cases, it is Ala.
PAGLLDLRQGMFAQLVAQNVLLIGGPLSWYSDPGLAGVSLTGGLSYKEDTKELVVAKAGVYYVFFQLELRRVVAGEGSGSVSLALHLQPLRSAAGAAALALTVDLPPASSEARNSAFGFQGRLLHLSAGXRLGVHLHTEARARHAWQLTQGATVLGLFRVTPEIPAGLPSPRSE

SEQ ID NO: 226 - protein, 174 aa, Artificial Sequence
  Synthetic sequence
  VARIANT (131)..(131): The amino acid at position 131 is any amino acid other than Arg. In some cases, it is Ala.
PAGLLDLRQGMFAQLVAQNVLLIGGPLSWYSDPGLAGVSLTGGLSYKEDTKELVVAKAGVYYVFFQLELRRVVAGEGSGSVSLALHLQPLRSAAGAAALALTVDLPPASSEARNSAFGFQGRLLHLSAGQXLGVHLHTEARARHAWQLTQGATVLGLFRVTPEIPAGLPSPRSE

SEQ ID NO: 227 - protein, 174 aa, Artificial Sequence
  Synthetic sequence
  VARIANT (132)..(132): The amino acid at position 132 is any amino acid other than Leu. In some cases, it is Ala.
PAGLLDLRQGMFAQLVAQNVLLIGGPLSWYSDPGLAGVSLTGGLSYKEDTKELVVAKAGVYYVFFQLELRRVVAGEGSGSVSLALHLQPLRSAAGAAALALTVDLPPASSEARNSAFGFQGRLLHLSAGQRXGVHLHTEARARHAWQLTQGATVLGLFRVTPEIPAGLPSPRSE

SEQ ID NO: 228 - protein, 174 aa, Artificial Sequence
  Synthetic sequence
  VARIANT (133)..(133): The amino acid at position 133 is any amino acid other than Gly. In some cases, it is Ala.
PAGLLDLRQGMFAQLVAQNVLLIGGPLSWYSDPGLAGVSLTGGLSYKEDTKELVVAKAGVYYVFFQLELRRVVAGEGSGSVSLALHLQPLRSAAGAAALALTVDLPPASSEARNSAFGFQGRLLHLSAGQRLXVHLHTEARARHAWQLTQGATVLGLFRVTPEIPAGLPSPRSE

SEQ ID NO: 229 - protein, 174 aa, Artificial Sequence
  Synthetic sequence
  VARIANT (134)..(134): The amino acid at position 134 is any amino acid other than Val. In some cases, it is Ala.
PAGLLDLRQGMFAQLVAQNVLLIGGPLSWYSDPGLAGVSLTGGLSYKEDTKELVVAKAGVYYVFFQLELRRVVAGEGSGSVSLALHLQPLRSAAGAAALALTVDLPPASSEARNSAFGFQGRLLHLSAGQRLGXHLHTEARARHAWQLTQGATVLGLFRVTPEIPAGLPSPRSE

SEQ ID NO: 230 - protein, 174 aa, Artificial Sequence
  Synthetic sequence
  VARIANT (135)..(135): The amino acid at position 135 is any amino acid other than His. In some cases, it is Ala.
PAGLLDLRQGMFAQLVAQNVLLIGGPLSWYSDPGLAGVSLTGGLSYKEDTKELVVAKAGVYYVFFQLELRRVVAGEGSGSVSLALHLQPLRSAAGAAALALTVDLPPASSEARNSAFGFQGRLLHLSAGQRLGVXLHTEARARHAWQLTQGATVLGLFRVTPEIPAGLPSPRSE

SEQ ID NO: 231 - protein, 174 aa, Artificial Sequence
  Synthetic sequence
  VARIANT (136)..(136): The amino acid at position 136 is any amino acid other than Leu. In some cases, it is Ala.
PAGLLDLRQGMFAQLVAQNVLLIGGPLSWYSDPGLAGVSLTGGLSYKEDTKELVVAKAGVYYVFFQLELRRVVAGEGSGSVSLALHLQPLRSAAGAAALALTVDLPPASSEARNSAFGFQGRLLHLSAGQRLGVHXHTEARARHAWQLTQGATVLGLFRVTPEIPAGLPSPRSE

SEQ ID NO: 232 - protein, 174 aa, Artificial Sequence
  Synthetic sequence
  VARIANT (137)..(137): The amino acid at position 137 is any amino acid other than His. In some cases, it is Ala.
PAGLLDLRQGMFAQLVAQNVLLIGGPLSWYSDPGLAGVSLTGGLSYKEDTKELVVAKAGVYYVFFQLELRRVVAGEGSGSVSLALHLQPLRSAAGAAALALTVDLPPASSEARNSAFGFQGRLLHLSAGQRLGVHLXTEARARHAWQLTQGATVLGLFRVTPEIPAGLPSPRSE

SEQ ID NO: 233 - protein, 174 aa, Artificial Sequence
  Synthetic sequence
  VARIANT (138)..(138): The amino acid at position 138 is any amino acid other than Arg. In some cases, it is Ala.
PAGLLDLRQGMFAQLVAQNVLLIGGPLSWYSDPGLAGVSLTGGLSYKEDTKELVVAKAGVYYVFFQLELRRVVAGEGSGSVSLALHLQPLRSAAGAAALALTVDLPPASSEARNSAFGFQGRLLHLSAGQRLGVHLHXEARARHAWQLTQGATVLGLFRVTPEIPAGLPSPRSE

SEQ ID NO: 234 - protein, 174 aa, Artificial Sequence
  Synthetic sequence
  VARIANT (139)..(139): The amino acid at position 139 is any amino acid other than Glu. In some cases, it is Ala.
PAGLLDLRQGMFAQLVAQNVLLIGGPLSWYSDPGLAGVSLTGGLSYKEDTKELVVAKAGVYYVFFQLELRRVVAGEGSGSVSLALHLQPLRSAAGAAALALTVDLPPASSEARNSAFGFQGRLLHLSAGQRLGVHLHTXARARHAWQLTQGATVLGLFRVTPEIPAGLPSPRSE

SEQ ID NO: 235 - protein, 174 aa, Artificial Sequence
  Synthetic sequence
  VARIANT (141)..(141): The amino acid at position 141 is any amino acid other than Arg. In some cases, it is Ala.
PAGLLDLRQGMFAQLVAQNVLLIGGPLSWYSDPGLAGVSLTGGLSYKEDTKELVVAKAGVYYVFFQLELRRVVAGEGSGSVSLALHLQPLRSAAGAAALALTVDLPPASSEARNSAFGFQGRLLHLSAGQRLGVHLHTEAXARHAWQLTQGATVLGLFRVTPEIPAGLPSPRSE

SEQ ID NO: 236 - protein, 174 aa, Artificial Sequence
  Synthetic sequence
  VARIANT (143)..(143): The amino acid at position 143 is any amino acid other than Arg. In some cases, X is Ala.
PAGLLDLRQGMFAQLVAQNVLLIGGPLSWYSDPGLAGVSLTGGLSYKEDTKELVVAKAGVYYVFFQLELRRVVAGEGSGSVSLALHLQPLRSAAGAAALALTVDLPPASSEARNSAFGFQGRLLHLSAGQRLGVHLHTEARAXHAWQLTQGATVLGLFRVTPEIPAGLPSPRSE

SEQ ID NO: 237 - protein, 174 aa, Artificial Sequence
  Synthetic sequence
  VARIANT (144)..(144): The amino acid at position 144 is any amino acid other than Arg. In some cases, it is Ala.
PAGLLDLRQGMFAQLVAQNVLLIGGPLSWYSDPGLAGVSLTGGLSYKEDTKELVVAKAGVYYVFFQLELRRVVAGEGSGSVSLALHLQPLRSAAGAAALALTVDLPPASSEARNSAFGFQGRLLHLSAGQRLGVHLHTEARARXAWQLTQGATVLGLFRVTPEIPAGLPSPRSE

SEQ ID NO: 238 - protein, 174 aa, Artificial Sequence
  Synthetic sequence
  VARIANT (146)..(146): The amino acid at position 146 is any amino acid other than Trp. In some cases, it is Ala.
PAGLLDLRQGMFAQLVAQNVLLIGGPLSWYSDPGLAGVSLTGGLSYKEDTKELVVAKAGVYYVFFQLELRRVVAGEGSGSVSLALHLQPLRSAAGAAALALTVDLPPASSEARNSAFGFQGRLLHLSAGQRLGVHLHTEARARHAXQLTQGATVLGLFRVTPEIPAGLPSPRSE

SEQ ID NO: 239 - protein, 174 aa, Artificial Sequence
  Synthetic sequence
  VARIANT (148)..(148): The amino acid at position 148 is any amino acid other than Leu. In some cases, it is Ala.
PAGLLDLRQGMFAQLVAQNVLLIGGPLSWYSDPGLAGVSLTGGLSYKEDTKELVVAKAGVYYVFFQLELRRVVAGEGSGSVSLALHLQPLRSAAGAAALALTVDLPPASSEARNSAFGFQGRLLHLSAGQRLGVHLHTEARARHAWQXTQGATVLGLFRVTPEIPAGLPSPRSE

SEQ ID NO: 240 - protein, 174 aa, Artificial Sequence
  Synthetic sequence
  VARIANT (149)..(149): The amino acid at position 149 is any amino acid other than Thr. In some cases, it is Ala.
PAGLLDLRQGMFAQLVAQNVLLIGGPLSWYSDPGLAGVSLTGGLSYKEDTKELVVAKAGVYYVFFQLELRRVVAGEGSGSVSLALHLQPLRSAAGAAALALTVDLPPASSEARNSAFGFQGRLLHLSAGQRLGVHLHTEARARHAWQLXQGATVLGLFRVTPEIPAGLPSPRSE

SEQ ID NO: 241 - protein, 174 aa, Artificial Sequence
  Synthetic sequence
  VARIANT (150)..(150): The amino acid at position 150 is any amino acid other than Gln. In some cases, it is Ala.
PAGLLDLRQGMFAQLVAQNVLLIGGPLSWYSDPGLAGVSLTGGLSYKEDTKELVVAKAGVYYVFFQLELRRVVAGEGSGSVSLALHLQPLRSAAGAAALALTVDLPPASSEARNSAFGFQGRLLHLSAGQRLGVHLHTEARARHAWQLTXGATVLGLFRVTPEIPAGLPSPRSE

SEQ ID NO: 242 - protein, 174 aa, Artificial Sequence
  Synthetic sequence
  VARIANT (151)..(151): The amino acid at position 151 is any amino acid other than Gly. In some cases, it is Ala.
PAGLLDLRQGMFAQLVAQNVLLIGGPLSWYSDPGLAGVSLTGGLSYKEDTKELVVAKAGVYYVFFQLELRRVVAGEGSGSVSLALHLQPLRSAAGAAALALTVDLPPASSEARNSAFGFQGRLLHLSAGQRLGVHLHTEARARHAWQLTQXATVLGLFRVTPEIPAGLPSPRSE

SEQ ID NO: 243 - protein, 174 aa, Artificial Sequence
  Synthetic sequence
  VARIANT (153)..(153): The amino acid at position 153 is any amino acid other than Thr. In some cases, it is Ala.
PAGLLDLRQGMFAQLVAQNVLLIGGPLSWYSDPGLAGVSLTGGLSYKEDTKELVVAKAGVYYVFFQLELRRVVAGEGSGSVSLALHLQPLRSAAGAAALALTVDLPPASSEARNSAFGFQGRLLHLSAGQRLGVHLHTEARARHAWQLTQGAXVLGLFRVTPEIPAGLPSPRSE

SEQ ID NO: 244 - protein, 174 aa, Artificial Sequence
  Synthetic sequence
  VARIANT (154)..(154): The amino acid at position 154 is any amino acid other than Val. In some cases, it is Ala.
PAGLLDLRQGMFAQLVAQNVLLIGGPLSWYSDPGLAGVSLTGGLSYKEDTKELVVAKAGVYYVFFQLELRRVVAGEGSGSVSLALHLQPLRSAAGAAALALTVDLPPASSEARNSAFGFQGRLLHLSAGQRLGVHLHTEARARHAWQLTQGATXLGLFRVTPEIPAGLPSPRSE

SEQ ID NO: 245 - protein, 133 aa, Homo sapiens [sequence omitted]

SEQ ID NO: 246 - protein, 251 aa, Homo sapiens
ELCDDDPPEIPHATFKAMAYKEGTMLNCECKRGFRRIKSGSLYMLCTGNSSHSSWDNQCQCTSSATRNTTKQVTPQPEEQKERKTTEMQSPMQPVDQASLPGHCREPPPWENEATERIYHFVVGQMVYYQCVQGYRALHRGPAESVCKMTHGKTRWTQPQLICTGEMETSQFPGEEKPQASPEGRPESETSCLVTTTDFQIQTEMAATMETSIFTTEYQVAVAGCVFLLISVLLLSGLTWQRRQRKSRRTI

SEQ ID NO: 247 - protein, 524 aa, Homo sapiens
VNGTSQFTCFYNSRANISCVWSQDGALQDTSCQVHAWPDRRRWNQTCELLPVSQASWACNLILGAPDSQKLTTVDIVTLRVLCREGVRWRVMAIQDFKPFENLRLMAPISLQVVHVETHRCNISWEISQASHYFERHLEFEARTLSPGHTWEEAPLLTLKQKQEWICLETLTPDTQYEFQVRVKPLQGEFTTWSPWSQPLAFRTKPAALGKDTIPWLGHLLVGLSGAFGFIILVYLLINCRNTGPWLKKVLKCNTPDPSKFFSQLSSEHGGDVQKWLSSPFPSSSFSPGGLAPEISPLEVLERDKVTQLLLQQDKVPEPASLSSNHSLTSCFTNQGYFFFHLPDALEIEACQVYFTYDPYSEEDPDEGVAGAPTGSSPQPLQPLSGEDDAYCTFPSRDDLLLFSPSLLGGPSPPSTAPGGSGAGEERMPPSLQERVPRDWDPQPLGPPTPGVPDLVDFQPPPELVLREAGEEVPDAGPREGVSFPWSRPPGQGEFRALNARLPLNTDAYLSLQELQGQDPTHLV

SEQ ID NO: 248 - protein, 347 aa, Homo sapiens
LNTTILTPNGNEDTTADFFLTTMPTDSLSVSTLPLPEVQCFVFNVEYMNCTWNSSSEPQPTNLTLHYWYKNSDNDKVQKCSHYLFSEEITSGCQLQKKEIHLYQTFVVQLQDPREPRRQATQMLKLQNLVIPWAPENLTLHKLSESQLELNWNNRFLNHCLEHLVQYRTDWDHSWTEQSVDYRHKFSLPSVDGQKRYTFRVRSRFNPLCGSAQHWSEWSHPIHWGSNTSKENPFLFALEAVVISVGSMGLIISLLCVYFWLERTMPRIPTLKNLEDLVTEYHGNFSAWSGVSKGLAESLQPDYSERLCLVSEIPPKGGALGEGPGASPCNQHSPYWAPPCYTLKPET

SEQ ID NO: 249 - protein, 133 aa, Artificial Sequence
  Synthetic sequence
  VARIANT (42)..(42): The amino acid at position 42 is any amino acid other than Phe. In some cases, it is Ala.
APTSSSTKKTQLQLEHLLLDLQMILNGINNYKNPKLTRMLTXKFYMPKKATELKHLQCLEEELKPLEEVLNLAQSKNFHLRPRDLISNINVIVLELKGSETTFMCEYADETATIVEFLNRWITFCQSIISTLT

SEQ ID NO: 250 - protein, 133 aa, Artificial Sequence
  Synthetic sequence
  VARIANT (20)..(20): The amino acid at position 20 is any amino acid other than Asp. In some cases, it is Ala.
APTSSSTKKTQLQLEHLLLXLQMILNGINNYKNPKLTRMLTFKFYMPKKATELKHLQCLEEELKPLEEVLNLAQSKNFHLRPRDLISNINVIVLELKGSETTFMCEYADETATIVEFLNRWITFCQSIISTLT

SEQ ID NO: 251 - protein, 133 aa, Artificial Sequence
  Synthetic sequence
  VARIANT (15)..(15): The amino acid at position 15 is any amino acid other than Glu. In some cases, it is Ala.
APTSSSTKKTQLQLXHLLLDLQMILNGINNYKNPKLTRMLTFKFYMPKKATELKHLQCLEEELKPLEEVLNLAQSKNFHLRPRDLISNINVIVLELKGSETTFMCEYADETATIVEFLNRWITFCQSIISTLT

SEQ ID NO: 252 - protein, 133 aa, Artificial Sequence
  Synthetic sequence
  VARIANT (16)..(16): The amino acid at position 16 is any amino acid other than His. In some cases, it is Ala, Arg, Asn, Asp, Cys, Glu, Gln, Gly, Ile, Lys, Leu, Met, Phe, Pro, Ser, Thr, Tyr and Val
APTSSSTKKTQLQLEXLLLDLQMILNGINNYKNPKLTRMLTFKFYMPKKATELKHLQCLEEELKPLEEVLNLAQSKNFHLRPRDLISNINVIVLELKGSETTFMCEYADETATIVEFLNRWITFCQSIISTLT

SEQ ID NO: 253 - protein, 133 aa, Artificial Sequence
  Synthetic sequence
  VARIANT (45)..(45): The amino acid at postion 45 is any amino acid other than Tyr. In some cases, it is Ala.
APTSSSTKKTQLQLEHLLLDLQMILNGINNYKNPKLTRMLTFKFXMPKKATELKHLQCLEEELKPLEEVLNLAQSKNFHLRPRDLISNINVIVLELKGSETTFMCEYADETATIVEFLNRWITFCQSIISTLT

SEQ ID NO: 254 - protein, 133 aa, Artificial Sequence
  Synthetic sequence
  VARIANT (126)..(126): The amino acid at postion 126 is any amino acid other than Gln. In some cases, it is Ala.
APTSSSTKKTQLQLEHLLLDLQMILNGINNYKNPKLTRMLTFKFYMPKKATELKHLQCLEEELKPLEEVLNLAQSKNFHLRPRDLISNINVIVLELKGSETTFMCEYADETATIVEFLNRWITFCXSIISTLT

SEQ ID NO: 255 - protein, 133 aa, Artificial Sequence
  Synthetic sequence
  VARIANT (16)..(16): The amino acid at postion 16 is any amino acid other than His. In some cases, it is Ala. In some cases, it is Thr.
  VARIANT (42)..(42): The amino acid at postion 42 is any amino acid other than Phe. In some cases, it is Ala.
APTSSSTKKTQLQLEXLLLDLQMILNGINNYKNPKLTRMLTXKFYMPKKATELKHLQCLEEELKPLEEVLNLAQSKNFHLRPRDLISNINVIVLELKGSETTFMCEYADETATIVEFLNRWITFCQSIISTLT

SEQ ID NO: 256 - protein, 133 aa, Artificial Sequence
  Synthetic sequence
  VARIANT (20)..(20): The amino acid at postion 20 is any amino acid other than Asp. In some cases, it is Ala.
  VARIANT (42)..(42): The amino acid at postion 42 is any amino acid other than Phe. In some cases, it is Ala.
APTSSSTKKTQLQLEHLLLXLQMILNGINNYKNPKLTRMLTXKFYMPKKATELKHLQCLEEELKPLEEVLNLAQSKNFHLRPRDLISNINVIVLELKGSETTFMCEYADETATIVEFLNRWITFCQSIISTLT

SEQ ID NO: 257 - protein, 133 aa, Artificial Sequence
  Synthetic sequence
  VARIANT (15)..(15): The amino acid at postion 15 is any amino acid other than Glu. In some cases, it is Ala.
  VARIANT (20)..(20): The amino acid at postion 20 is any amino acid other than Asp. In some cases, it is Ala.
  VARIANT (42)..(42): The amino acid at postion 42 is any amino acid other than Phe. In some cases, it is Ala.
APTSSSTKKTQLQLXHLLLXLQMILNGINNYKNPKLTRMLTXKFYMPKKATELKHLQCLEEELKPLEEVLNLAQSKNFHLRPRDLISNINVIVLELKGSETTFMCEYADETATIVEFLNRWITFCQSIISTLT

SEQ ID NO: 258 - protein, 133 aa, Artificial Sequence
  Synthetic sequence
  VARIANT (16)..(16): The amino acid at postion 16 is any amino acid other than His. In some cases, it is Ala.
  VARIANT (20)..(20): The amino acid at postion 20 is any amino acid other than Asp. In some cases, it is Ala.
  VARIANT (42)..(42): The amino acid at postion 42 is any amino acid other than Phe. In some cases, it is Ala.
APTSSSTKKTQLQLEXLLLXLQMILNGINNYKNPKLTRMLTXKFYMPKKATELKHLQCLEEELKPLEEVLNLAQSKNFHLRPRDLISNINVIVLELKGSETTFMCEYADETATIVEFLNRWITFCQSIISTLT

SEQ ID NO: 259 - protein, 133 aa, Artificial Sequence
  Synthetic sequence
  VARIANT (20)..(20): The amino acid at postion 20 is any amino acid other than Asp. In some cases, it is Ala.
  VARIANT (42)..(42): The amino acid at postion 42 is any amino acid other than Phe. In some cases, it is Ala.
  VARIANT (126)..(126): The amino acid at postion 126 is any amino acid other than Gln. In some cases, it is Ala.
APTSSSTKKTQLQLEHLLLXLQMILNGINNYKNPKLTRMLTXKFYMPKKATELKHLQCLEEELKPLEEVLNLAQSKNFHLRPRDLISNINVIVLELKGSETTFMCEYADETATIVEFLNRWITFCXSIISTLT

SEQ ID NO: 260 - protein, 133 aa, Artificial Sequence
  Synthetic sequence
  VARIANT (20)..(20): The amino acid at postion 20 is any amino acid other than Asp. In some cases, it is Ala.
  VARIANT (42)..(42): The amino acid at postion 42 is any amino acid other than Phe. In some cases, it is Ala.
  VARIANT (45)..(45): The amino acid at postion 45 is any amino acid other than Tyr. In some cases, it is Ala.
APTSSSTKKTQLQLEHLLLXLQMILNGINNYKNPKLTRMLTXKFXMPKKATELKHLQCLEEELKPLEEVLNLAQSKNFHLRPRDLISNINVIVLELKGSETTFMCEYADETATIVEFLNRWITFCQSIISTLT

SEQ ID NO: 261 - protein, 133 aa, Artificial Sequence
  Synthetic sequence
  VARIANT (16)..(16): The amino acid at postion 16 is any amino acid other than His. In some cases, it is Ala.
  VARIANT (20)..(20): The amino acid at postion 20 is any amino acid other than Asp. In some cases, it is Ala.
  VARIANT (42)..(42): The amino acid at postion 42 is any amino acid other than Phe. In some cases, it is Ala.
  VARIANT (45)..(45): The amino acid at postion 45 is any amino acid other than Tyr. In some cases, it is Ala.
APTSSSTKKTQLQLEXLLLXLQMILNGINNYKNPKLTRMLTXKFXMPKKATELKHLQCLEEELKPLEEVLNLAQSKNFHLRPRDLISNINVIVLELKGSETTFMCEYADETATIVEFLNRWITFCQSIISTLT

SEQ ID NO: 262 - protein, 133 aa, Artificial Sequence
  Synthetic sequence
  VARIANT (20)..(20): The amino acid at postion 20 is any amino acid other than Asp. In some cases, it is Ala.
  VARIANT (42)..(42): The amino acid at postion 42 is any amino acid other than Phe. In some cases, it is Ala.
  VARIANT (45)..(45): The amino acid at postion 45 is any amino acid other than Tyr. In some cases, it is Ala.
  VARIANT (126)..(126): The amino acid at postion 126 is any amino acid other than Gln. In some cases, it is Ala.
APTSSSTKKTQLQLEHLLLXLQMILNGINNYKNPKLTRMLTXKFXMPKKATELKHLQCLEEELKPLEEVLNLAQSKNFHLRPRDLISNINVIVLELKGSETTFMCEYADETATIVEFLNRWITFCXSIISTLT

SEQ ID NO: 263 - protein, 133 aa, Artificial Sequence
  Synthetic sequence
  VARIANT (16)..(16): The amino acid at postion 16 is any amino acid other than His. In some cases, it is Ala.
  VARIANT (20)..(20): The amino acid at postion 20 is any amino acid other than Asp. In some cases, it is Ala.
  VARIANT (42)..(42): The amino acid at postion 42 is any amino acid other than Phe. In some cases, it is Ala.
  VARIANT (45)..(45): The amino acid at postion 45 is any amino acid other than Tyr. In some cases, it is Ala.
  VARIANT (126)..(126): The amino acid at postion 126 is any amino acid other than Gln. In some cases, it is Ala.
APTSSSTKKTQLQLEXLLLXLQMILNGINNYKNPKLTRMLTXKFXMPKKATELKHLQCLEEELKPLEEVLNLAQSKNFHLRPRDLISNINVIVLELKGSETTFMCEYADETATIVEFLNRWITFCXSIISTLT

SEQ ID NO: 264 - protein, 133 aa, Artificial Sequence
  Synthetic sequence
  VARIANT (16)..(16): The amino acid at postion 16 is any amino acid other than His. In some cases, it is Ala.
  VARIANT (42)..(42): The amino acid at postion 42 is any amino acid other than Phe. In some cases, it is Ala.
  VARIANT (126)..(126): The amino acid at postion 126 is any amino acid other than Gln. In some cases, it is Ala.
APTSSSTKKTQLQLEXLLLDLQMILNGINNYKNPKLTRMLTXKFYMPKKATELKHLQCLEEELKPLEEVLNLAQSKNFHLRPRDLISNINVIVLELKGSETTFMCEYADETATIVEFLNRWITFCXSIISTLT

SEQ ID NO: 265 - protein, 112 aa, Artificial Sequence
  Synthetic sequence
ALDTNYCFSSTEKNCCVRQLYIDFRKDLGWKWIHEPKGYHANFCLGPCPYIWSLDTQYSKVLALYNQHNPGASAAPCCVPQALEPLPIVYYVGRKPKVEQLSNMIVRSCKCS

SEQ ID NO: 266 - protein, 112 aa, Artificial Sequence
  Synthetic sequence
ALDTNYCFSSTEKNCCVRQLYIDFRKDLGWKWIHEPKGYHANFCLGPCPYIWSLDTQYSKVLALYNQHNPGASAAPSCVPQALEPLPIVYYVGRKPKVEQLSNMIVRSCKCS

SEQ ID NO: 267 - protein, 112 aa, Artificial Sequence
  Synthetic sequence
ALDAAYCFRNVQDNCCLRPLYIDFKRDLGWKWIHEPKGYNANFCAGACPYLWSSDTQHSRVLSLYNTINPEASASPCCVSQDLEPLTILYYIGKTPKIEQLSNMIVKSCKCS

SEQ ID NO: 268 - protein, 112 aa, Artificial Sequence
  Synthetic sequence
ALDAAYCFRNVQDNCCLRPLYIDFKRDLGWKWIHEPKGYNANFCAGACPYLWSSDTQHSRVLSLYNTINPEASASPSCVSQDLEPLTILYYIGKTPKIEQLSNMIVKSCKCS

SEQ ID NO: 269 - protein, 112 aa, Artificial Sequence [sequence omitted]

SEQ ID NO: 270 - protein, 112 aa, Artificial Sequence
  Synthetic sequence
ALDTNYCFRNLEENCCVRPLYIDFRQDLGWKWVHEPKGYYANFCSGPCPYLRSADTTHSTVLGLYNTLNPEASASPSCVPQDLEPLTILYYVGRTPKVEQLSNMVVKSCKCS

SEQ ID NO: 271 - protein, 33 aa, Artificial Sequence
  Synthetic sequence
RMKQIEDKIEEILSKIYHIENEIARIKKLIGER

SEQ ID NO: 272 - protein, 32 aa, Artificial Sequence
  Synthetic sequence
LSSIEKKQEEQTSWLIWISNELTLIRNELAQS

SEQ ID NO: 273 - protein, 31 aa, Artificial Sequence
  Synthetic sequence
LSSIEKKLEEITSQLIQISNELTLIRNELAQ

SEQ ID NO: 274 - protein, 31 aa, Artificial Sequence
  Synthetic sequence
LSSIEKKLEEITSQLIQIRNELTLIRNELAQ

SEQ ID NO: 275 - protein, 31 aa, Artificial Sequence
  Synthetic sequence
LSSIEKKLEEITSQLQQIRNELTLIRNELAQ

SEQ ID NO: 276 - protein, 31 aa, Artificial Sequence
  Synthetic sequence
LSSLEKKLEELTSQLIQLRNELTLLRNELAQ

SEQ ID NO: 277 - protein, 31 aa, Artificial Sequence
  Synthetic sequence
ISSLEKKIEELTSQIQQLRNEITLLRNEIAQ

SEQ ID NO: 278 - protein, 47 aa, Artificial Sequence
  Synthetic sequence
LEIEAAFLERENTALETRVAELRQRVQRLRNRVSQYRTRYGPLGGGK

SEQ ID NO: 279 - protein, 64 aa, Artificial Sequence
  Synthetic sequence
VTAFSNMDDMLQKAHLVIEGTFIYLRDSTEFFIRVRDGWKKLQLGELIPIPADSPPPPALSSNP

SEQ ID NO: 280 - protein, 31 aa, Artificial Sequence
  Synthetic sequence
LKSVENRLAVVENQLKTVIEELKTVKDLLSN

SEQ ID NO: 281 - protein, 31 aa, Artificial Sequence
  Synthetic sequence
LARIEEKLKTIKAQLSEIASTLNMIREQLAQ

SEQ ID NO: 282 - protein, 31 aa, Artificial Sequence
  Synthetic sequence
VSRLEEKVKTLKSQVTELASTVSLLREQVAQ

SEQ ID NO: 283 - protein, 30 aa, Artificial Sequence
  Synthetic sequence
IQSEKKIEDISSLIGQIQSEITLIRNEIAQ

SEQ ID NO: 284 - protein, 31 aa, Artificial Sequence
  Synthetic sequence
LMSLEKKLEELTQTLMQLQNELSMLKNELAQ

SEQ ID NO: 285 - protein, 18 aa, Artificial Sequence
  Synthetic sequence
VDLEGSTSNGRQCAGIRL

SEQ ID NO: 286 - protein, 27 aa, Artificial Sequence
  Synthetic sequence
EDDVTTTEELAPALVPPPKGTCAGWMA

SEQ ID NO: 287 - protein, 27 aa, Artificial Sequence
  Synthetic sequence
GHDQETTTQGPGVLLPLPKGACTGQMA

SEQ ID NO: 288 - protein, 9 aa, Artificial Sequence
  Synthetic sequence
YPYDVPDYA

SEQ ID NO: 289 - protein, 8 aa, Artificial Sequence
  Synthetic sequence
DYKDDDDK

SEQ ID NO: 290 - protein, 10 aa, Artificial Sequence
  Synthetic sequence
EQKLISEEDL

SEQ ID NO: 291 - protein, 5 aa, Artificial Sequence
  Synthetic sequence
HHHHH

SEQ ID NO: 292 - protein, 6 aa, Artificial Sequence
  Synthetic sequence
HHHHHH

SEQ ID NO: 293 - protein, 8 aa, Artificial Sequence
  Synthetic sequence
WSHPQFEK

SEQ ID NO: 294 - protein, 5 aa, Artificial Sequence
  Synthetic sequence
RYIRS

SEQ ID NO: 295 - protein, 4 aa, Artificial Sequence
  Synthetic sequence
FHHT

SEQ ID NO: 296 - protein, 17 aa, Artificial Sequence
  Synthetic sequence
WEAAAREACCRECCARA

SEQ ID NO: 297 - protein, 220 aa, Artificial Sequence
  Synthetic sequence
FTVTVPKDLYVVEYGSNMTIECKFPVEKQLDLAALIVYWEMEDKNIIQFVHGEEDLKVQHSSYRQRARLLKDQLSLGNAALQITDVKLQDAGVYRCMISYGGADYKRITVKVNAPYNKINQRILVVDPVTSEHELTCQAEGYPKAEVIWTSSDHQVLSGKTTTTNSKREEKLFNVTSTLRINTTTNEIFYCTFRRLDPEENHTAELVIPELPLAHPPNER

SEQ ID NO: 298 - protein, 189 aa, Artificial Sequence
  Synthetic sequence
IKEEHVIIQAEFYLNPDQSGEFMFDFDGDEIFHVDMAKKETVWRLEEFGRFASFEAQGALANIAVDKANLEIMTKRSNYTPITNVPPEVTVLTNSPVELREPNVLICFIDKFTPPVVNVTWLRNGKPVTTGVSETVFLPREDHLFRKFHYLPFLPSTEDVYDCRVEHWGLDEPLLKHWEFDAPSPLPET

SEQ ID NO: 299 - protein, 226 aa, Artificial Sequence; identical to SEQ ID NO: 57
  Synthetic sequence

SEQ ID NO: 300 - protein, 199 aa, Artificial Sequence
  Synthetic sequence
GDTRPRFLEQVKHECHFFNGTERVRFLDRYFYHQEEYVRFDSDVGEYRAVTELGRPDAEYWNSQKDLLEQKRAAVDTYCRHNYGVGESFTVQRRVYPEVTVYPAKTQPLQHHNLLVCSVNGFYPASIEVRWFRNGQEEKTGVVSTGLIQNGDWTFQTLVMLETVPRSGEVYTCQVEHPSLTSPLTVEWRARSESAQSKM

SEQ ID NO: 301 - protein, 15 aa, Artificial Sequence
  Synthetic sequence
GGGGSGGGGSGGGGS

SEQ ID NO: 302 - protein, 20 aa, Artificial Sequence
  Synthetic sequence
GGGGSGGGGSGGGGSGGGGS

SEQ ID NO: 303 - protein, 13 aa, Artificial Sequence
  Synthetic sequence
PKYVKQNTLKLAT

SEQ ID NO: 304 - protein, 133 aa, Artificial Sequence
  Synthetic sequence
APTSSSTKKTQLQLEALLLDLQMILNGINNYKNPKLTRMLTAKFYMPKKATELKHLQCLEEELKPLEEVLNLAQSKNFHLRPRDLISNINVIVLELKGSETTFMCEYADETATIVEFLNRWITFCQSIISTLT

SEQ ID NO: 305 - protein, 92 aa, Artificial Sequence
  Synthetic sequence
DTRPRFLWQHKFECHFFNGTERVRLLERCIYNQEESVRFDSDVGEYRAVTELGRPDAEYWNSQKDLLEQRRAAVDTYCRHNYGVGESFTVQR

SEQ ID NO: 306 - protein, 84 aa, Artificial Sequence
  Synthetic sequence
IKEEHVIIQAEFYLNPDQSGEFMFDFDGDEIFHVDMAKKETVWRLEEFGRFASFEAQGALANIAVDKANLEIMTKRSNYTPITN

SEQ ID NO: 307 - protein, 105 aa, Artificial Sequence
  Synthetic sequence
VPPEVTVLTNSPVELREPNVLICFIDKFTPPVVNVTWLRNGKPVTTGVSETVFLPREDHLFRKFHYLPFLPSTEDVYDCRVEHWGLDEPLLKHWEFDAPSPLPET

SEQ ID NO: 308 - protein, 47 aa, Artificial Sequence
  Synthetic sequence
LEIRAAFLRQRNTALRTEVAELEQEVQRLENEVSQYETRYGPLGGGK

SEQ ID NO: 309 - protein, 227 aa, Artificial Sequence
  Synthetic sequence
DKTHTCPPCPAPELLGGPSVFLFPPKPKDTLMISRTPEVTCVVVDVSHEDPEVKFNWYVDGVEVHNAKTKPREEQYASTYRVVSVLTVLHQDWLNGKEYKCKVSNKALPAPIEKTISKAKGQPREPQVYTLPPSREEMTKNQVSLTCLVKGFYPSDIAVEWESNGQPENNYKTTPPVLDSDGSFFLYSKLTVDKSRWQQGNVFSCSVMHEALHNHYTQKSLSLSPGK

SEQ ID NO: 310 - protein, 103 aa, Artificial Sequence
  Synthetic sequence
PKVTVYPSKTQPLQHHNLLVCSVSGFYPGSIEVRWFRNGQEEKAGVVSTGLIQNGDWTFQTLVMLETVPRSGEVYTCQVEHPSVTSPLTVEWRARSESAQSKM

SEQ ID NO: 311 - protein, 105 aa, Artificial Sequence
  Synthetic sequence
VEPKVTVYPSKTQPLQHHNLLVCSVSGFYPGSIEVRWFRNGQEEKAGVVSTGLIQNGDWTFQTLVMLETVPRSGEVYTCQVEHPSVTSPLTVEWRARSESAQSKM

SEQ ID NO: 312 - protein, 14 aa, Artificial Sequence
  Synthetic sequence
LPLKMLNIPSINVH

SEQ ID NO: 313 - protein, 105 aa, Artificial Sequence
  Synthetic sequence
VYPEVTVYPAKTQPLQHHNLLVCSVNGFYPASIEVRWFRNGQEEKTGVVSTGLIQNGDWTFQTLVMLETVPRSGEVYTCQVEHPSLTSPLTVEWRARSESAQSKM

SEQ ID NO: 314 - protein, 93 aa, Artificial Sequence
  Synthetic sequence
GDTRPRFLWQHKFECHFFNGTERVRLLERCIYNQEESVRFDSDVGEYRAVTELGRPDAEYWNSQKDLLEQRRAAVDTYCRHNYGVGESFTVQR

SEQ ID NO: 315 - protein, 96 aa, Artificial Sequence
  Synthetic sequence
DTRPRFLWQHKFECHFFNGTERVRLLERCIYNQEESVRFDSDVGEYRAVTELGRPDAEYWNSQKDLLEQRRAAVDTYCRHNYGVGESFTVQRRVEP

SEQ ID NO: 316 - protein, 79 aa, Artificial Sequence
  Synthetic sequence
IKEEHVIIQAEFYLNPDQSGEFMFDFDGDEIFHVDMAKKETVWRLEEFGRFASFEAQGALANIAVDKANLEIMTKRSNY

SEQ ID NO: 317 - protein, 95 aa, Artificial Sequence
  Synthetic sequence
EVTVLTNSPVELREPNVLICFIDKFTPPVVNVTWLRNGKPVTTGVSETVFLPREDHLFRKFHYLPFLPSTEDVYDCRVEHWGLDEPLLKHWEFDA

SEQ ID NO: 318 - protein, 227 aa, Artificial Sequence
  Synthetic sequence
DKTHTCPPCPAPEAAGGPSVFLFPPKPKDTLMISRTPEVTCVVVDVSHEDPEVKFNWYVDGVEVHNAKTKPREEQYNSTYRVVSVLTVLHQDWLNGKEYKCKVSNKALPAPIEKTISKAKGQPREPQVYTLPPSREEMTKNQVSLTCLVKGFYPSDIAVEWESNGQPENNYKTTPPVLDSDGSFFLYSKLTVDKSRWQQGNVFSCSVMHEALHNHYTQKSLSLSPGK

SEQ ID NO: 319 - protein, 95 aa, Artificial Sequence
  Synthetic sequence
KVTVYPSKTQPLQHHNLLVCSVSGFYPGSIEVRWFRNGQEEKAGVVSTGLIQNGDWTFQTLVMLETVPRSGEVYTCQVEHPSVTSPLTVEWRARS

SEQ ID NO: 320 - protein, 98 aa, Artificial Sequence
  Synthetic sequence
VPPEVTVLTNSPVELREPNVLICFIDKFTPPVVNVTWLRNGKPVTTGVSETVFLPREDHLFRKFHYLPFLPSTEDVYDCRVEHWGLDEPLLKHWEFDA

SEQ ID NO: 321 - protein, 223 aa, Artificial Sequence; identical to SEQ ID NO: 60
  Synthetic sequence

SEQ ID NO: 322 - protein, 9 aa, Artificial Sequence
  Synthetic sequence
LVSRSIYNR

SEQ ID NO: 323 - protein, 9 aa, Artificial Sequence
  Synthetic sequence
ILERKRAAV

SEQ ID NO: 324 - protein, 9 aa, Artificial Sequence
  Synthetic sequence
LGLPAAEYW

SEQ ID NO: 325 - protein, 9 aa, Artificial Sequence
  Synthetic sequence
LGLPSAEYW

SEQ ID NO: 326 - protein, 227 aa, Artificial Sequence
  Synthetic sequence
NFIRMVISNPAATGGGGSGGGGSGGGGSGDTRPRFLEQVKHECHFFNGTERVRFLDRYFYHQEEYVRFDSDVGEYRAVTELGRPDAEYWNSQKDLLEQKRAAVDTYCRHNYGVGESFTVQRRVYPEVTVYPAKTQPLQHHNLLVCSVNGFYPASIEVRWFRNGQEEKTGVVSTGLIQNGDWTFQTLVMLETVPRSGEVYTCQVEHPSLTSPLTVEWRARSESAQSKM

SEQ ID NO: 327 - protein, 112 aa, Artificial Sequence
  Synthetic sequence
FTVRETASTKGPSVFPLAPSSKSTSGGTAALGCLVKDYFPEPVTVSWNSGALTSGVHTFPAVLQSSGLYSLSSVVTVPSSSLGTQTYICNVNHKPSNTKVDKKVEPKSCDKT

SEQ ID NO: 328 - protein, 106 aa, Artificial Sequence; identical to SEQ ID NO: 4
  Synthetic sequence

SEQ ID NO: 329 - protein, 254 aa, Homo sapiens
MAISGVPVLGFFIIAVLMSAQESWAIKEEHVIIQAEFYLNPDQSGEFMFDFDGDEIFHVDMAKKETVWRLEEFGRFASFEAQGALANIAVDKANLEIMTKRSNYTPITNVPPEVTVLTNSPVELREPNVLICFIDKFTPPVVNVTWLRNGKPVTTGVSETVFLPREDHLFRKFHYLPFLPSTEDVYDCRVEHWGLDEPLLKHWEFDAPSPLPETTENVVCALGLTVGLVGIIIGTIFIIKGLRKSNAAERRGPL

SEQ ID NO: 330 - protein, 266 aa, Homo sapiens
MVCLKLPGGSCMTALTVTLMVLSSPLALAGDTRPRFLWQLKFECHFFNGTERVRLLERCIYNQEESVRFDSDVGEYRAVTELGRPDAEYWNSQKDLLEQRRAAVDTYCRHNYGVGESFTVQRRVEPKVTVYPSKTQPLQHHNLLVCSVSGFYPGSIEVRWFRNGQEEKAGVVSTGLIQNGDWTFQTLVMLETVPRSGEVYTCQVEHPSVTSPLTVEWRARSESAQSKMLSGVGGFVLGLLFLGAGLFIYFRNQKGHSGLQPTGFLS

SEQ ID NO: 331 - protein, 266 aa, Homo sapiens
MVCLRLPGGSCMAVLTVTLMVLSSPLALAGDTRPRFLEYSTSECHFFNGTERVRYLDRYFHNQEENVRFDSDVGEFRAVTELGRPDAEYWNSQKDLLEQKRGRVDNYCRHNYGVVESFTVQRRVHPKVTVYPSKTQPLQHHNLLVCSVSGFYPGSIEVRWFRNGQEEKTGVVSTGLIHNGDWTFQTLVMLETVPRSGEVYTCQVEHPSVTSPLTVEWRARSESAQSKMLSGVGGFVLGLLFLGAGLFIYFRNQKGHSGLQPRGFLS

SEQ ID NO: 332 - protein, 266 aa, Homo sapiens [sequence omitted]

SEQ ID NO: 333 - protein, 266 aa, Homo sapiens
MVCLKLPGGSCMAALTVTLMVLSSPLALAGDTQPRFLWQGKYKCHFFNGTERVQFLERLFYNQEEFVRFDSDVGEYRAVTELGRPVAESWNSQKDILEDRRGQVDTVCRHNYGVGESFTVQRRVHPEVTVYPAKTQPLQHHNLLVCSVSGFYPGSIEVRWFRNGQEEKAGVVSTGLIQNGDWTFQTLVMLETVPRSGEVYTCQVEHPSVMSPLTVEWRARSESAQSKMLSGVGGFVLGLLFLGAGLFIYFRNQKGHSGLQPTGFLS

SEQ ID NO: 334 - protein, 266 aa, Homo sapiens [sequence omitted]

SEQ ID NO: 335 - protein, 266 aa, Homo sapiens [sequence omitted]

SEQ ID NO: 336 - protein, 266 aa, Homo sapiens [sequence omitted]

SEQ ID NO: 337 - protein, 266 aa, Homo sapiens [sequence omitted]

SEQ ID NO: 338 - protein, 266 aa, Homo sapiens [sequence omitted]

SEQ ID NO: 339 - protein, 266 aa, Homo sapiens [sequence omitted]

SEQ ID NO: 340 - protein, 266 aa, Homo sapiens [sequence omitted]

SEQ ID NO: 341 - protein, 266 aa, Homo sapiens
MVCLKLPGGSCMTALTVTLMVLSSPLALSGDTRPRFLWQPKRECHFFNGTERVRFLDRYFYNQEESVRFDSDVGEFRAVTELGRPDAEYWNSQKDILEQARAAVDTYCRHNYGVVESFTVQRRVQPKVTVYPSKTQPLQHHNLLVCSVSGFYPGSIEVRWFLNGQEEKAGMVSTGLIQNGDWTFQTLVMLETVPRSGEVYTCQVEHPSVTSPLTVEWRARSESAQSKMLSGVGGFVLGLLFLGAGLFIYFRNQKGHSGLQPTGFLS

SEQ ID NO: 342 - protein, 266 aa, Homo sapiens [sequence omitted]

SEQ ID NO: 343 - protein, 266 aa, Homo sapiens
MVCLKLPGGSSLAALTVTLMVLSSRLAFAGDTRPRFLELRKSECHFFNGTERVRYLDRYFHNQEEFLRFDSDVGEYRAVTELGRPVAESWNSQKDLLEQKRGRVDNYCRHNYGVGESFTVQRRVHPQVTVYPAKTQPLQHHNLLVCSVSGFYPGSIEVRWFRNGQEEKAGVVSTGLIQNGDWTFQTLVMLETVPRSGEVYTCQVEHPSVTSALTVEWRARSESAQSKMLSGVGGFVLGLLFLGAGLFIYFRNQKGHSGLQPTGFLS

SEQ ID NO: 344 - protein, 266 aa, Homo sapiens [sequence omitted]

SEQ ID NO: 345 - protein, 266 aa, Homo sapiens
MVCLKLPGGSSLAALTVTLMVLSSRLAFAGDTRPRFLELLKSECHFFNGTERVRFLERHFHNQEEYARFDSDVGEYRAVRELGRPDAEYWNSQKDLLEQKRGQVDNYCRHNYGVVESFTVQRRVHPQVTVYPAKTQPLQHHNLLVCSVSGFYPGSIEVRWFRNGQEEKAGVVSTGLIQNGDWTFQTLVMLETFPRSGEVYTCQVEHPSVTSPLTVEWSARSESAQSKMLSGVGGFVLGLLFLGAGLFIYFRNQKGHSGLQPTGFLS

SEQ ID NO: 346 - protein, 266 aa, Homo sapiens [sequence omitted]

SEQ ID NO: 347 - protein, 266 aa, Homo sapiens
MVCLKLPGGSCMAALTVTLTVLSSPLALAGDTQPRFLEQAKCECHFLNGTERVWNLIRYIYNQEEYARYNSDLGEYQAVTELGRPDAEYWNSQKDLLERRRAEVDTYCRYNYGVVESFTVQRRVQPKVTVYPSKTQPLQHHNLLVCSVNGFYPGSIEVRWFRNGQEEKAGVVSTGLIQNGDWTFQTLVMLETVPRSGEVYTCQVEHPSMMSPLTVQWSARSESAQSKMLSGVGGFVLGLLFLGTGLFIYFRNQKGHSGLQPTGLLS

SEQ ID NO: 348 - protein, 266 aa, Homo sapiens
MVCLKLPGGSYMAKLTVTLMVLSSPLALAGDTRPRFLQQDKYECHFFNGTERVRFLHRDIYNQEEDLRFDSDVGEYRAVTELGRPDAEYWNSQKDFLEDRRAAVDTYCRHNYGVGESFTVQRRVEPKVTVYPARTQTLQHHNLLVCSVNGFYPGSIEVRWFRNSQEEKAGVVSTGLIQNGDWTFQTLVMLETVPRSGEVYTCQVEHPSVTSPLTVEWRAQSESAQSKMLSGVGGFVLGLLFLGAGLFIYFKNQKGHSGLHPTGLVS

SEQ ID NO: 349 - protein, 261 aa, Homo sapiens
MGHEQNQGAALLQMLPLLWLLPHSWAVPEAPTPMWPDDLQNHTFLHTVYCQDGSPSVGLSEAYDEDQLFFFDFSQNTRVPRLPEFADWAQEQGDAPAILFDKEFCEWMIQQIGPKLDGKIPVSRGFPIAEVFTLKPLEFGKPNTLVCFVSNLFPPMLTVNWQHHSVPVEGFGPTFVSAVDGLSFQAFSYLNFTPEPSDIFSCIVTHEIDRYTAIAYWVPRNALPSDLLENVLCGVAFGLGVLGIIVGIVLIIYFRKPCSGD

SEQ ID NO: 350 - protein, 263 aa, Homo sapiens
MITFLPLLLGLSLGCTGAGGFVAHVESTCLLDDAGTPKDFTYCISFNKDLLTCWDPEENKMAPCEFGVLNSLANVLSQHLNQKDTLMQRLRNGLQNCATHTQPFWGSLTNRTRPPSVQVAKTTPFNTREPVMLACYVWGFYPAEVTITWRKNGKLVMPHSSAHKTAQPNGDWTYQTLSHLALTPSYGDTYTCVVEHTGAPEPILRDWTPGLSPMQTLKVSVSAVTLGLGLIIFSLGVISWRRAGHSSYTPLPGSNYSEGWHIS

SEQ ID NO: 351 - protein, 250 aa, Homo sapiens
MALRAGLVLGFHTLMTLLSPQEAGATKADHMGSYGPAFYQSYGASGQFTHEFDEEQLFSVDLKKSEAVWRLPEFGDFARFDPQGGLAGIAAIKAHLDILVERSNRSRAINVPPRVTVLPKSRVELGQPNILICIVDNIFPPVINITWLRNGQTVTEGVAQTSFYSQPDHLFRKFHYLPFVPSAEDVYDCQVEHWGLDAPLLRHWELQVPIPPPDAMETLVCALGLAIGLVGFLVGTVLIIMGTYVSSVPR

SEQ ID NO: 352 - protein, 273 aa, Homo sapiens
MGSGWVPWVVALLVNLTRLDSSMTQGTDSPEDFVIQAKADCYFTNGTEKVQFVVRFIFNLEEYVRFDSDVGMFVALTKLGQPDAEQWNSRLDLLERSRQAVDGVCRHNYRLGAPFTVGRKVQPEVTVYPERTPLLHQHNLLHCSVTGFYPGDIKIKWFLNGQEERAGVMSTGPIRNGDWTFQTVVMLEMTPELGHVYTCLVDHSSLLSPVSVEWRAQSEYSWRKMLSGIAAFLLGLIFLLVGIVIQLRAQKGYVRTQMSGNEVSRAVLLPQSC

SEQ ID NO: 353 - protein, 260 aa, Homo sapiens
MRPEDRMFHIRAVILRALSLAFLLSLRGAGAIKADHVSTYAAFVQTHRPTGEFMFEFDEDEMFYVDLDKKETVWHLEEFGQAFSFEAQGGLANIAILNNNLNTLIQRSNHTQATNDPPEVTVFPKEPVELGQPNTLICHIDKFFPPVLNVTWLCNGELVTEGVAESLFLPRTDYSFHKFHYLTFVPSAEDFYDCRVEHWGLDQPLLKHWEAQEPIQMPETTETVLCALGLVLGLVGIIVGTVLIIKSLRSGHDPRAQGTL

SEQ ID NO: 354 - protein, 260 aa, Homo sapiens [sequence omitted]

SEQ ID NO: 355 - protein, 258 aa, Homo sapiens [sequence omitted]

SEQ ID NO: 356 - protein, 258 aa, Homo sapiens
MMVLQVSAAPRTVALTALLMVLLTSVVQGRATPENYLFQGRQECYAFNGTQRFLERYIYNREEFVRFDSDVGEFRAVTELGRPDEEYWNSQKDILEEERAVPDRMCRHNYELGGPMTLQRRVQPRVNVSPSKKGPLQHHNLLVCHVTDFYPGSIQVRWFLNGQEETAGVVSTNLIRNGDWTFQILVMLEMTPQQGDVYTCQVEHTSLDSPVTVEWKAQSDSARSKTLTGAGGFVLGLIICGVGIFMHRRSKKVQRGSA

SEQ ID NO: 357 - protein, 258 aa, Homo sapiens
MMVLQVSAAPRTVALTALLMVLLTSVVQGRATPENYVYQLRQECYAFNGTQRFLERYIYNREEFVRFDSDVGEFRAVTELGRPDEDYWNSQKDLLEEKRAVPDRVCRHNYELDEAVTLQRRVQPKVNVSPSKKGPLQHHNLLVCHVTDFYPGSIQVRWFLNGQEETAGVVSTNLIRNGDWTFQILVMLEMTPQQGDVYICQVEHTSLDSPVTVEWKAQSDSARSKTLTGAGGFVLGLIICGVGIFMHRRSKKVQRGSA

SEQ ID NO: 358 - protein, 258 aa, Homo sapiens
MMVLQVSAAPRTVALTALLMVLLTSVVQGRATPENYLFQGRQECYAFNGTQRFLERYIYNREEFARFDSDVGEFRAVTELGRPAAEYWNSQKDILEEKRAVPDRMCRHNYELGGPMTLQRRVQPRVNVSPSKKGPLQHHNLLVCHVTDFYPGSIQVRWFLNGQEETAGVVSTNLIRNGDWTFQILVMLEMTPQQGDVYTCQVEHTSLDSPVTVEWKAQSDSARSKTLTGAGGFVLGLIICGVGIFMHRRSKKVQRGSA

SEQ ID NO: 359 - protein, 258 aa, Homo sapiens [sequence omitted]

SEQ ID NO: 360 - protein, 258 aa, Homo sapiens [sequence omitted]

SEQ ID NO: 361 - protein, 258 aa, Homo sapiens [sequence omitted]

SEQ ID NO: 362 - protein, 258 aa, Homo sapiens [sequence omitted]

SEQ ID NO: 363 - protein, 258 aa, Homo sapiens [sequence omitted]

SEQ ID NO: 364 - protein, 255 aa, Homo sapiens [sequence omitted]

SEQ ID NO: 365 - protein, 255 aa, Homo sapiens
MILNKALLLGALALTTVMSPCGGEDIVADHVASCGVNLYQFYGPSGQYTHEFDGDEQFYVDLERKETAWRWPEFSKFGGFDPQGALRNMAVAKHNLNIMIKRYNSTAATNEVPEVTVFSKSPVTLGQPNTLICLVDNIFPPVVNITWLSNGQSVTEGVSETSFLSKSDHSFFKISYLTFLPSADEIYDCKVEHWGLDQPLLKHWEPEIPAPMSELTETVVCALGLSVGLMGIVVGTVFIIQGLRSVGASRHQGPL

SEQ ID NO: 366 - protein, 254 aa, Homo sapiens
MILNKALMLGALALTTVMSPCGGEDIVADHVASYGVNLYQSYGPSGQFTHEFDGDEEFYVDLERKETVWKLPLFHRLRFDPQFALTNIAVLKHNLNILIKRSNSTAATNEVPEVTVFSKSPVTLGQPNTLICLVDNIFPPVVNITWLSNGHSVTEGVSETSFLSKSDHSFFKISYLTFLPSADEIYDCKVEHWGLDEPLLKHWEPEIPAPMSELTETVVCALGLSVGLVGIVVGTVLIIRGLRSVGASRHQGPL

SEQ ID NO: 367 - protein, 254 aa, Homo sapiens
MILNKALMLGALALTTVMSPCGGEDIVADHVASYGVNLYQSYGPSGQYSHEFDGDEEFYVDLERKETVWQLPLFRRFRRFDPQFALTNIAVLKHNLNIVIKRSNSTAATNEVPEVTVFSKSPVTLGQPNTLICLVDNIFPPVVNITWLSNGHSVTEGVSTSFLSKSDHSFFKISYLTFLPSADEIYDCKVEHWGLDEPLLKHWEPEIPTPMSELTETVVCALGLSVGLVGIVVGTVLIIRGLRSVGASRHQGPL

SEQ ID NO: 368 - protein, 254 aa, Homo sapiens
MILNKALLLGALALTTVMSPCGGEDIVADHVASYGVNLYQSYGPSGQYTHEFDGDEQFYVDLGRKETVWCLPVLRQFRFDPQFALTNIAVTKHNLNILIKRSNSTAATNEVPEVTVFSKSPVTLGQPNTLICLVDNIFPPVVNITWLSNGHSVTEGVSETSFLSKSDHSFFKISYLTFLPSADEIYDCKVEHWGLDEPLLKHWEPEIPAPMSELTETVVCALGLSVGLVGIVVGTVFIIRGLRSVGASRHQGPL

SEQ ID NO: 369 - protein, 254 aa, Homo sapiens
MILNKALMLGALALTTVMSPCGGEDIVADHVASYGVNLYQSYGPSGQYTHEFDGDEQFYVDLGRKETVWCLPVLRQFRFDPQFALTNIAVLKHNLNSLIKRSNSTAATNEVPEVTVFSKSPVTLGQPNILICLVDNIFPPVVNITWLSNGHSVTEGVSETSFLSKSDHSFFKISYLTLLPSAEESYDCKVEHWGLDKPLLKHWEPEIPAPMSELTETVVCALGLSVGLVGIVVGTVFIIRGLRSVGASRHQGPL

SEQ ID NO: 370 - protein, 254 aa, Homo sapiens
MILNKALMLGTLALTTVMSPCGGEDIVADHVASYGVNLYQSYGPSGQYTHEFDGDEQFYVDLGRKETVWCLPVLRQFRFDPQFALTNIAVLKHNLNSLIKRSNSTAATNEVPEVTVFSKSPVTLGQPNILICLVDNIFPPVVNITWLSNGHSVTEGVSETSFLSKSDHSFFKISYLTLLPSAEESYDCKVEHWGLDKPLLKHWEPEIPAPMSELTETVVCALGLSVGLVGIVVGTVFIIRGLRSVGASRHQGPL

SEQ ID NO: 371 - protein, 254 aa, Homo sapiens [sequence omitted]

SEQ ID NO: 372 - protein, 255 aa, Homo sapiens
MILNKALLLGALALTAVMSPCGGEDIVADHVASYGVNFYQSHGPSGQYTHEFDGDEEFYVDLETKETVWQLPMFSKFISFDPQSALRNMAVGKHTLEFMMRQSNSTAATNEVPEVTVFSKFPVTLGQPNTLICLVDNIFPPVVNITWLSNGHSVTEGVSETSFLSKSDHSFFKISYLTFLPSADEIYDCKVEHWGLDEPLLKHWEPEIPAPMSELTETLVCALGLSVGLMGIVVGTVFIIQGLRSVGASRHQGLL

SEQ ID NO: 373 - protein, 269 aa, Homo sapiens
MSWKKALRIPGDLRVATVTLMLAMLSSLLAEGRDSPEDFVFQFKGMCYFTNGTERVRLVTRYIYNREEYARFDSDVGVYRAVTPQGRPDAEYWNSQKEVLEGTRAELDTVCRHNYEVAFRGILQRRVEPTVTISPSRTEALNHHNLLVCSVTDFYPGQIKVRWFRNDQEETAGVVSTPLIRNGDWTFQILVMLEMTPQRGDVYTCHVEHPSLQSPITVEWRAQSESAQSKMLSGVGGFVLGLIFLGLGLIIRQRSQKGPQGPPPAGLLH

SEQ ID NO: 374 - protein, 261 aa, Homo sapiens; identical to SEQ ID NO: 55

SEQ ID NO: 375 - protein, 261 aa, Homo sapiens [sequence omitted]

SEQ ID NO: 376 - protein, 227 aa, Homo sapiens
MALQIPGGFWAAAVTVMLVMLSTPVAEARDFPKDFLVQFKGMCYFTNGTERVRGVARYIYNREEYGRFDSDVGEFQAVTELGRSIEDWNNYKDFLEQERAAVDKVCRHNYEAELRTTLQRQVEPTVTISPSRTEALNHHNLLVCSVTDFYPAQIKVRWFRNDQEETAGVVSTSLIRNGDWTFQILVMLEITPQRGDIYTCQVEHPSLQSPITVEWRPRGPPPAGLLH

SEQ ID NO: 377 - protein, 264 aa, Homo sapiens
MALQIPGGFWAAAVTVMLVMLSTPVAEARDFPKDFLVQFKGMCYFTNGTERVRGVARYIYNREEYGRFDSDVGEFQAVTELGRSIEDWNNYKDFLEQERAAVDKVCRHNYEAELRTTLQRQVEPTVTISPSRTEALNHHNLLVCSVTDFYPAQIKVRWFRNDQEETAGVVSTSLIRNGDWTFQILVMLEITPQRGDIYTCQVEHPSLQSPITVEWRAQSESAQSKMLSGIGGFVLGLIFLGLGLIIRHRGQKGPRGPPPAGLLH

SEQ ID NO: 378 - protein, 227 aa, Homo sapiens
DKTHTCPPCPAPELLGGPSVFLFPPKPKDTLMISRTPEVTCVVVDVSHEDPEVKFNWYVDGVEVHNAKTKPREEQYNSTYRVVSVLTVLHQDWLNGKEYKCKVSNKALPAPIEKTISKAKGQPREPQVYTLPPSRDELTKNQVSLTCLVKGFYPSDIAVEWESNGQPENNYKTTPPVLDSDGSFFLYSKLTVDKSRWQQGNVFSCSVMHEALHNHYTQKSLSLSPGK

SEQ ID NO: 379 - protein, 325 aa, Homo sapiens
STKGPSVFPLAPCSRSTSESTAALGCLVKDYFPEPVTVSWNSGALTSGVHTFPAVLQSSGLYSLSSVVTVPSSNFGTQTYTCNVDHKPSNTKVDKTVERKCCVECPPCPAPPVAGPSVFLFPPKPKDTLMISRTPEVTCVVVDVSHEDPEVQFNWYVDGVEVHNAKTKPREEQFNSTFRVVSVLTVVHQDWLNGKEYKCKVSNKGLPAPIEKTISKTKGQPREPQVYTLPPSREEMTKNQVSLTCLVKGFYPSDIAVEWESNGQPENNYKTTPPMLDSDGSFFLYSKLTVDKSRWQQGNVFSCSVMHEALHNHYTQKSLSLSPGK

SEQ ID NO: 380 - protein, 246 aa, Homo sapiens
HKPSNTKVDKRVELKTPLGDTTHTCPPCPAPELLGGPSVFLFPPKPKDTLMISRTPEVTCVVVDVSHEDPEVKFNWYVDGVEVHNAKTKPREEQYNSTYRVVSVLTVLHQDWLNGKEYKCKVSNKALPAPIEKTISKAKGQPREPQVYTLPPSRDELTKNQVSLTCLVKGFYPSDIAVEWESNGQPENNYKTTPPVLDSDGSFFLYSKLTVDKSRWQQGNVFSCSVMHEALHNHYTQKSLSLSPGK

SEQ ID NO: 381 - protein, 383 aa, Homo sapiens
PTKAPDVFPIISGCRHPKDNSPVVLACLITGYHPTSVTVTWYMGTQSQPQRTFPEIQRRDSYYMTSSQLSTPLQQWRQGEYKCVVQHTASKSKKEIFRWPESPKAQASSVPTAQPQAEGSLAKATTAPATTRNTGRGGEEKKKEKEKEEQEERETKTPECPSHTQPLGVYLLTPAVQDLWLRDKATFTCFVVGSDLKDAHLTWEVAGKVPTGGVEEGLLERHSNGSQSQHSRLTLPRSLWNAGTSVTCTLNHPSLPPQRLMALREPAAQAPVKLSLNLLASSDPPEAASWLLCEVSGFSPPNILLMWLEDQREVNTSGFAPARPPPQPRSTTFWAWSVLRVPAPPSPQPATYTCVVSHEDSRTLLNASRSLEVSYVTDHGPMK

SEQ ID NO: 382 - protein, 276 aa, Homo sapiens
VTSTLTIKZSDWLGESMFTCRVDHRGLTFQQNASSMCVPDQDTAIRVFAIPPSFASIFLTKSTKLTCLVTDLTTYBSVTISWTREENGAVKTHTNISESHPNATFSAVGEASICEDBDWSGERFTCTVTHTDLPSPLKQTISRPKGVALHRPBVYLLPPARZZLNLRESATITCLVTGFSPADVFVEWMQRGEPLSPQKYVTSAPMPEPQAPGRYFAHSILTVSEEEWNTGGTYTCVVAHEALPNRVTERTVDKSTGKPTLYNVSLVMSDTAGTCY

SEQ ID NO: 383 - protein, 353 aa, Homo sapiens
ASPTSPKVFPLSLCSTQPDGNVVIACLVQGFFPQEPLSVTWSESGQGVTARNFPPSQDASGDLYTTSSQLTLPATQCLAGKSVTCHVKHYTNPSQDVTVPCPVPSTPPTPSPSTPPTPSPSCCHPRLSLHRPALEDLLLGSEANLTCTLTGLRDASGVTFTWTPSSGKSAVQGPPERDLCGCYSVSSVLPGCAEPWNHGKTFTCTAAYPESKTPLTATLSKSGNTFRPEVHLLPPPSEELALNELVTLTCLARGFSPKDVLVRWLQGSQELPREKYLTWASRQEPSQGTTTFAVTSILRVAAEDWKKGDTFSCMVGHEALPLAFTQKTIDRLAGKPTHVNVSVVMAEVDGTCY

SEQ ID NO: 384 - protein, 222 aa, Homo sapiens
ADPCDSNPRGVSAYLSRPSPFDLFIRKSPTITCLVVDLAPSKGTVNLTWSRASGKPVNHSTRKEEKQRNGTLTVTSTLPVGTRDWIEGETYQCRVTHPHLPRALMRSTTKTSGPRAAPEVYAFATPEWPGSRDKRTLACLIQNFMPEDISVQWLHNEVQLPDARHSTTQPRKTKGSGFFVFSRLEVTRAEWEQKDEFICRAVHEAASPSQTVQRAVSVNPGK

SEQ ID NO: 385 - protein, 327 aa, Homo sapiens
ASTKGPSVFPLAPCSRSTSESTAALGCLVKDYFPEPVTVSWNSGALTSGVHTFPAVLQSSGLYSLSSVVTVPSSSLGTKTYTCNVDHKPSNTKVDKRVESKYGPPCPSCPAPEFLGGPSVFLFPPKPKDTLMISRTPEVTCVVVDVSQEDPEVQFNWYVDGVEVHNAKTKPREEQFNSTYRVVSVLTVLHQDWLNGKEYKCKVSNKGLPSSIEKTISKAKGQPREPQVYTLPPSQEEMTKNQVSLTCLVKGFYPSDIAVEWESNGQPENNYKTTPPVLDSDGSFFLYSRLTVDKSRWQEGNVFSCSVMHEALHNHYTQKSLSLSLGK

SEQ ID NO: 386 - protein, 227 aa, Homo sapiens
DKTHTCPPCPAPELLGGPSVFLFPPKPKDTLMISRTPEVTCVVVDVSHEDPEVKFNWYVDGVEVHNAKTKPREEQYNSTYRVVSVLTVLHQDWLNGKEYKCKVSNKALPAPIEKTISKAKGQPREPQVYTLPPSREEMTKNQVSLTCLVKGFYPSDIAVEWESNGQPENNYKTTPPVLDSDGSFFLYSKLTVDKSRWQQGNVFSCSVMHEALHNHYTQKSLSLSPGK

SEQ ID NO: 387 - protein, 227 aa, Homo sapiens
DKTHTCPPCPAPEFEGGPSVFLFPPKPKDTLMISRTPEVTCVVVDVSHEDPEVKFNWYVDGVEVHNAKTKPREEQYNSTYRVVSVLTVLHQDWLNGKEYKCKVSNKALPASIEKTISKAKGQPREPQVYTLPPSREEMTKNQVSLTCLVKGFYPSDIAVEWESNGQPENNYKTTPPVLDSDGSFFLYSKLTVDKSRWQQGNVFSCSVMHEALHNHYTQKSLSLSPGK

SEQ ID NO: 388 - protein, 227 aa, Homo sapiens; identical to SEQ ID NO: 309

SEQ ID NO: 389 - protein, 227 aa, Homo sapiens; identical to SEQ ID NO: 318

SEQ ID NO: 390 - protein, 493 aa, Artificial Sequence
  Synthetic sequence
MYRMQLLSCIALSLALVTNSAPTSSSTKKTQLQLEALLLDLQMILNGINNYKNPKLTRMLTAKFYMPKKATELKHLQCLEEELKPLEEVLNLAQSKNFHLRPRDLISNINVIVLELKGSETTFMCEYADETATIVEFLNRWITFCQSIISTLTGGGGSGGGGSGGGGSGGGGSAPTSSSTKKTQLQLEALLLDLQMILNGINNYKNPKLTRMLTAKFYMPKKATELKHLQCLEEELKPLEEVLNLAQSKNFHLRPRDLISNINVIVLELKGSETTFMCEYADETATIVEFLNRWITFCQSIISTLTGGGGSGGGGSGGGGSGGGGSVEPKVTVYPSKTQPLQHHNLLVCSVSGFYPGSIEVRWFRNGQEEKAGVVSTGLIQNGDWTFQTLVMLETVPRSGEVYTCQVEHPSVTSPLTVEWRARSESAQSKMGGGGSGGGGSGGGGSLEIEAAFLERENTALETRVAELRQRVQRLRNRVSQYRTRYGPLGGGK

SEQ ID NO: 391 - DNA, 1485 bp, Artificial Sequence
  Synthetic sequence
atgtacaggatgcaactcctgtcttgcattgcactaagtcttgcacttgtcacaaacagtgcacctacttcaagttctacaaagaaaacacagctacaactggaggcattactgctggatttacagatgattttgaatggaattaataattacaagaatcccaaactcaccaggatgctcacagcaaagttttacatgcccaagaaggccacagaactgaaacatcttcagtgtctagaagaagaactcaaacctctggaggaagtgctaaatttagctcaaagcaaaaactttcacttaagacccagggacttaatcagcaatatcaacgtaatagttctggaactaaagggatctgaaacaacattcatgtgtgaatatgctgatgagacagcaaccattgtagaatttctgaacagatggattaccttttgtcaaagcatcatctcaacactgactggaggcggaggatctggtggtggaggttctggtggtgggggatctggaggcggaggatctgcacctacttcaagttctacaaagaaaacacagctacaactggaggcattactgctggatttacagatgattttgaatggaattaataattacaagaatcccaaactcaccaggatgctcacagcaaagttttacatgcccaagaaggccacagaactgaaacatcttcagtgtctagaagaagaactcaaacctctggaggaagtgctaaatttagctcaaagcaaaaactttcacttaagacccagggacttaatcagcaatatcaacgtaatagttctggaactaaagggatctgaaacaacattcatgtgtgaatatgctgatgagacagcaaccattgtagaatttctgaacagatggattaccttttgtcaaagcatcatctcaacactgactggaggcggaggatctggtggtggaggttctggtggtgggggatctggaggcggaggatctgttgagcctaaggtgactgtgtatccttcaaagacccagcccctgcagcaccacaacctcctggtctgctctgtgagtggtttctatccaggcagcattgaagtcaggtggttccggaacggccaggaagagaaggctggggtggtgtccacaggcctgatccagaatggagattggaccttccagaccctggtgatgctggaaacagttcctcggagtggagaggtttacacctgccaagtggagcacccaagtgtgacgagccctctcacagtggaatggagagcacggtctgaatctgcacagagcaagatgggtggaggtggctcaggaggcggcggcagcggtggaggagggagcctggagatcgaggccgccttcctggagcgggagaacaccgccctggagacccgggtggccgagctgcggcagcgggtgcagcggctgcggaaccgggtgtcccagtaccggacccggtacggccccctgggcggcggcaagtagtga

SEQ ID NO: 392 - protein, 639 aa, Artificial Sequence
  Synthetic sequence
MYRMQLLSCIALSLALVTNSPKYVKQNTLKLATGGGGSGSGGGGSGGGGGDTRPRFLWQHKFECHFFNGTERVRLLERCIYNQEESVRFDSDVGEYRAVTELGRPDAEYWNSQKDLLEQRRAAVDTYCRHNYGVGESFTVQRGGGGSIKEEHVIIQAEFYLNPDQSGEFMFDFDGDEIFHVDMAKKETVWRLEEFGRFASFEAQGALANIAVDKANLEIMTKRSNYTPITNVPPEVTVLTNSPVELREPNVLICFIDKFTPPVVNVTWLRNGKPVTTGVSETVFLPREDHLFRKFHYLPFLPSTEDVYDCRVEHWGLDEPLLKHWEFDAPSPLPETGGGGSGGGGSLEIRAAFLRQRNTALRTEVAELEQEVQRLENEVSQYETRYGPLGGGKGGSAAAGGDKTHTCPPCPAPELLGGPSVFLFPPKPKDTLMISRTPEVTCVVVDVSHEDPEVKFNWYVDGVEVHNAKTKPREEQYASTYRVVSVLTVLHQDWLNGKEYKCKVSNKALPAPIEKTISKAKGQPREPQVYTLPPSREEMTKNQVSLTCLVKGFYPSDIAVEWESNGQPENNYKTTPPVLDSDGSFFLYSKLTVDKSRWQQGNVFSCSVMHEALHNHYTQKSLSLSPGKGGSHHHHHHHH

SEQ ID NO: 393 - DNA, 1923 bp, Artificial Sequence
  Synthetic sequence
atgtacaggatgcaactcctgtcttgcattgcactaagtcttgcacttgtcacaaacagtccgaaatatgtaaaacagaataccctgaaattggcaacaggaggtggcggatccggctccggtggaggtggctcaggaggcggcggcggggacacccgaccacgtttcttgtggcagcataagtttgaatgtcatttcttcaatgggacggagcgggtgcggttgctggaaagatgcatctataaccaagaggagtccgtgcgcttcgacagcgacgtgggggagtaccgggcggtgacggagctggggcggcctgatgccgagtactggaacagccagaaggacctcctggagcagaggcgggccgcggtggacacctactgcagacacaactacggggttggtgagagcttcacagtgcagcggggtggtggaggttcaatcaaagaagaacatgtgatcatccaggccgagttctatctgaatcctgaccaatcaggcgagtttatgtttgactttgatggtgatgagattttccatgtggatatggcaaagaaggagacggtctggcggcttgaagaatttggacgatttgccagctttgaggctcaaggtgcattggccaacatagctgtggacaaagccaacctggaaatcatgacaaagcgctccaactatactccgatcaccaatgtacctccagaggtaactgtgctcacaaacagccctgtggaactgagagagcccaacgtcctcatctgtttcatagacaagttcaccccaccagtggtcaatgtcacgtggcttcgaaatggaaaacctgtcaccacaggagtgtcagagacagtcttcctgcccagggaagaccaccttttccgcaagttccactatctccccttcctgccctcaactgaggacgtttacgactgcagggtggagcactggggcttggatgagcctcttctcaagcactgggagtttgatgctccaagccctctcccagagactggtggaggtggctcaggaggcggcggcagcctggagatccgggccgccttcctgcggcagcggaacaccgccctgcggaccgaggtggccgagctggagcaggaggtgcagcggctggagaacgaggtgtcccagtacgagacccggtacggccccctgggcggcggcaagggcggatcagcagctgcgggtggcgacaaaactcacacatgcccaccgtgcccagcacctgaactcctggggggaccgtcagtcttcctcttccccccaaaacccaaggacaccctcatgatctcccggacccctgaggtcacatgcgtggtggtggacgtgagccacgaagaccctgaggtcaagttcaactggtacgtggacggcgtggaggtgcataatgccaagacaaagccgcgggaggagcagtacgcaagcacgtaccgtgtggtcagcgtcctcaccgtcctgcaccaggactggctgaatggcaaggagtacaagtgcaaggtctccaacaaagccctcccagcccccatcgagaaaaccatctccaaagccaaagggcagccccgagaaccacaggtgtacaccctgcccccatcccgggaggagatgaccaagaaccaggtcagcctgacctgcctggtcaaaggcttctatcccagcgacatcgccgtggagtgggagagcaatgggcagccggagaacaactacaagaccacgcctcccgtgctggactccgacggctccttcttcctctacagcaagctcaccgtggacaagagcagatggcagcaggggaacgtcttctcatgctccgtgatgcacgaggctctgcacaaccactacacgcagaagtccctctccctgtctccgggtaaaggcggatcacatcaccatcaccatcaccatcactagtga

SEQ ID NO: 394 - protein, 711 aa, Artificial Sequence
  Synthetic sequence
MYRMQLLSCIALSLALVTNSPKYVKQNTLKLATGGGGSGSGGGGSGGGGGDTRPRFLWQHKFECHFFNGTERVRLLERCIYNQEESVRFDSDVGEYRAVTELGRPDAEYWNSQKDLLEQRRAAVDTYCRHNYGVGESFTVQRRVEPGGGGSIKEEHVIIQAEFYLNPDQSGEFMFDFDGDEIFHVDMAKKETVWRLEEFGRFASFEAQGALANIAVDKANLEIMTKRSNYTPITNVPPEVTVLTNSPVELREPNVLICFIDKFTPPVVNVTWLRNGKPVTTGVSETVFLPREDHLFRKFHYLPFLPSTEDVYDCRVEHWGLDEPLLKHWEFDAGGGGSGGGGSKVTVYPSKTQPLQHHNLLVCSVSGFYPGSIEVRWFRNGQEEKAGVVSTGLIQNGDWTFQTLVMLETVPRSGEVYTCQVEHPSVTSPLTVEWRARSGGGGSGGGGSGGGGSGGGGSGGGGSGGGGSAAAGGDKTHTCPPCPAPELLGGPSVFLFPPKPKDTLMISRTPEVTCVVVDVSHEDPEVKFNWYVDGVEVHNAKTKPREEQYASTYRVVSVLTVLHQDWLNGKEYKCKVSNKALPAPIEKTISKAKGQPREPQVYTLPPSREEMTKNQVSLTCLVKGFYPSDIAVEWESNGQPENNYKTTPPVLDSDGSFFLYSKLTVDKSRWQQGNVFSCSVMHEALHNHYTQKSLSLSPGKGGSHHHHHHHH

SEQ ID NO: 395 - DNA, 2139 bp, Artificial Sequence
  Synthetic sequence
atgtacaggatgcaactcctgtcttgcattgcactaagtcttgcacttgtcacaaacagtccgaaatatgtaaaacagaataccctgaaattggcaacaggaggtggcggatccggctccggtggaggtggctcaggaggcggcggcggggacacccgaccacgtttcttgtggcagcataagtttgaatgtcatttcttcaatgggacggagcgggtgcggttgctggaaagatgcatctataaccaagaggagtccgtgcgcttcgacagcgacgtgggggagtaccgggcggtgacggagctggggcggcctgatgccgagtactggaacagccagaaggacctcctggagcagaggcgggccgcggtggacacctactgcagacacaactacggggttggtgagagcttcacagtgcagcggcgagttgagcctggtggtggaggttcaatcaaagaagaacatgtgatcatccaggccgagttctatctgaatcctgaccaatcaggcgagtttatgtttgactttgatggtgatgagattttccatgtggatatggcaaagaaggagacggtctggcggcttgaagaatttggacgatttgccagctttgaggctcaaggtgcattggccaacatagctgtggacaaagccaacctggaaatcatgacaaagcgctccaactatactccgatcaccaatgtacctccagaggtaactgtgctcacaaacagccctgtggaactgagagagcccaacgtcctcatctgtttcatagacaagttcaccccaccagtggtcaatgtcacgtggcttcgaaatggaaaacctgtcaccacaggagtgtcagagacagtcttcctgcccagggaagaccaccttttccgcaagttccactatctccccttcctgccctcaactgaggacgtttacgactgcagggtggagcactggggcttggatgagcctcttctcaagcactgggagtttgatgctggaggcggaggatctggaggcggaggatctaaggtgactgtgtatccttcaaagacccagcccctgcagcaccacaacctcctggtctgctctgtgagtggtttctatccaggcagcattgaagtcaggtggttccggaacggccaggaagagaaggctggggtggtgtccacaggcctgatccagaatggagattggaccttccagaccctggtgatgctggaaacagttcctcggagtggagaggtttacacctgccaagtggagcacccaagtgtgacgagccctctcacagtggaatggagagcacggtctggaggcggaggatctggaggcggaggatctggtggtggaggttctggtggtgggggatctggaggcggaggatctggaggcggaggatctgcagctgcgggtggcgacaaaactcacacatgcccaccgtgcccagcacctgaactcctggggggaccgtcagtcttcctcttccccccaaaacccaaggacaccctcatgatctcccggacccctgaggtcacatgcgtggtggtggacgtgagccacgaagaccctgaggtcaagttcaactggtacgtggacggcgtggaggtgcataatgccaagacaaagccgcgggaggagcagtacgcaagcacgtaccgtgtggtcagcgtcctcaccgtcctgcaccaggactggctgaatggcaaggagtacaagtgcaaggtctccaacaaagccctcccagcccccatcgagaaaaccatctccaaagccaaagggcagccccgagaaccacaggtgtacaccctgcccccatcccgggaggagatgaccaagaaccaggtcagcctgacctgcctggtcaaaggcttctatcccagcgacatcgccgtggagtgggagagcaatgggcagccggagaacaactacaagaccacgcctcccgtgctggactccgacggctccttcttcctctacagcaagctcaccgtggacaagagcagatggcagcaggggaacgtcttctcatgctccgtgatgcacgaggctctgcacaaccactacacgcagaagtccctctccctgtctccgggtaaaggcggatcacatcaccatcaccatcaccatcactagtga

SEQ ID NO: 396 - protein, 992 aa, Artificial Sequence
  Synthetic sequence
MYRMQLLSCIALSLALVTNSPKYVKQNTLKLATGGGGSGSGGGGSGGGGGDTRPRFLWQHKFECHFFNGTERVRLLERCIYNQEESVRFDSDVGEYRAVTELGRPDAEYWNSQKDLLEQRRAAVDTYCRHNYGVGESFTVQRRVEPGGGGSIKEEHVIIQAEFYLNPDQSGEFMFDFDGDEIFHVDMAKKETVWRLEEFGRFASFEAQGALANIAVDKANLEIMTKRSNYTPITNVPPEVTVLTNSPVELREPNVLICFIDKFTPPVVNVTWLRNGKPVTTGVSETVFLPREDHLFRKFHYLPFLPSTEDVYDCRVEHWGLDEPLLKHWEFDAGGGGSGGGGSKVTVYPSKTQPLQHHNLLVCSVSGFYPGSIEVRWFRNGQEEKAGVVSTGLIQNGDWTFQTLVMLETVPRSGEVYTCQVEHPSVTSPLTVEWRARSGGGGSGGGGSGGGGSGGGGSAPTSSSTKKTQLQLEALLLDLQMILNGINNYKNPKLTRMLTAKFYMPKKATELKHLQCLEEELKPLEEVLNLAQSKNFHLRPRDLISNINVIVLELKGSETTFMCEYADETATIVEFLNRWITFCQSIISTLTGGGGSGGGGSGGGGSGGGGSAPTSSSTKKTQLQLEALLLDLQMILNGINNYKNPKLTRMLTAKFYMPKKATELKHLQCLEEELKPLEEVLNLAQSKNFHLRPRDLISNINVIVLELKGSETTFMCEYADETATIVEFLNRWITFCQSIISTLTGGGGSAAAGGDKTHTCPPCPAPELLGGPSVFLFPPKPKDTLMISRTPEVTCVVVDVSHEDPEVKFNWYVDGVEVHNAKTKPREEQYASTYRVVSVLTVLHQDWLNGKEYKCKVSNKALPAPIEKTISKAKGQPREPQVYTLPPSREEMTKNQVSLTCLVKGFYPSDIAVEWESNGQPENNYKTTPPVLDSDGSFFLYSKLTVDKSRWQQGNVFSCSVMHEALHNHYTQKSLSLSPGKGGSHHHHHHHH

SEQ ID NO: 397 - DNA, 2982 bp, Artificial Sequence
  Synthetic sequence
atgtacaggatgcaactcctgtcttgcattgcactaagtcttgcacttgtcacaaacagtccgaaatatgtaaaacagaataccctgaaattggcaacaggaggtggcggatccggctccggtggaggtggctcaggaggcggcggcggggacacccgaccacgtttcttgtggcagcataagtttgaatgtcatttcttcaatgggacggagcgggtgcggttgctggaaagatgcatctataaccaagaggagtccgtgcgcttcgacagcgacgtgggggagtaccgggcggtgacggagctggggcggcctgatgccgagtactggaacagccagaaggacctcctggagcagaggcgggccgcggtggacacctactgcagacacaactacggggttggtgagagcttcacagtgcagcggcgagttgagcctggtggtggaggttcaatcaaagaagaacatgtgatcatccaggccgagttctatctgaatcctgaccaatcaggcgagtttatgtttgactttgatggtgatgagattttccatgtggatatggcaaagaaggagacggtctggcggcttgaagaatttggacgatttgccagctttgaggctcaaggtgcattggccaacatagctgtggacaaagccaacctggaaatcatgacaaagcgctccaactatactccgatcaccaatgtacctccagaggtaactgtgctcacaaacagccctgtggaactgagagagcccaacgtcctcatctgtttcatagacaagttcaccccaccagtggtcaatgtcacgtggcttcgaaatggaaaacctgtcaccacaggagtgtcagagacagtcttcctgcccagggaagaccaccttttccgcaagttccactatctccccttcctgccctcaactgaggacgtttacgactgcagggtggagcactggggcttggatgagcctcttctcaagcactgggagtttgatgctggaggcggaggatctggaggcggaggatctaaggtgactgtgtatccttcaaagacccagcccctgcagcaccacaacctcctggtctgctctgtgagtggtttctatccaggcagcattgaagtcaggtggttccggaacggccaggaagagaaggctggggtggtgtccacaggcctgatccagaatggagattggaccttccagaccctggtgatgctggaaacagttcctcggagtggagaggtttacacctgccaagtggagcacccaagtgtgacgagccctctcacagtggaatggagagcacggtctggaggcggaggatctggtggtggaggttctggtggtgggggatctggaggcggaggatctgcacctacttcaagttctacaaagaaaacacagctacaactggaggcattactgctggatttacagatgattttgaatggaattaataattacaagaatcccaaactcaccaggatgctcacagcaaagttttacatgcccaagaaggccacagaactgaaacatcttcagtgtctagaagaagaactcaaacctctggaggaagtgctaaatttagctcaaagcaaaaactttcacttaagacccagggacttaatcagcaatatcaacgtaatagttctggaactaaagggatctgaaacaacattcatgtgtgaatatgctgatgagacagcaaccattgtagaatttctgaacagatggattaccttttgtcaaagcatcatctcaacactgactggaggcggaggatctggtggtggaggttctggtggtgggggatctggaggcggaggatctgcacctacttcaagttctacaaagaaaacacagctacaactggaggcattactgctggatttacagatgattttgaatggaattaataattacaagaatcccaaactcaccaggatgctcacagcaaagttttacatgcccaagaaggccacagaactgaaacatcttcagtgtctagaagaagaactcaaacctctggaggaagtgctaaatttagctcaaagcaaaaactttcacttaagacccagggacttaatcagcaatatcaacgtaatagttctggaactaaagggatctgaaacaacattcatgtgtgaatatgctgatgagacagcaaccattgtagaatttctgaacagatggattaccttttgtcaaagcatcatctcaacactgactggaggcggaggatctgcagctgcgggtggcgacaaaactcacacatgcccaccgtgcccagcacctgaactcctggggggaccgtcagtcttcctcttccccccaaaacccaaggacaccctcatgatctcccggacccctgaggtcacatgcgtggtggtggacgtgagccacgaagaccctgaggtcaagttcaactggtacgtggacggcgtggaggtgcataatgccaagacaaagccgcgggaggagcagtacgcaagcacgtaccgtgtggtcagcgtcctcaccgtcctgcaccaggactggctgaatggcaaggagtacaagtgcaaggtctccaacaaagccctcccagcccccatcgagaaaaccatctccaaagccaaagggcagccccgagaaccacaggtgtacaccctgcccccatcccgggaggagatgaccaagaaccaggtcagcctgacctgcctggtcaaaggcttctatcccagcgacatcgccgtggagtgggagagcaatgggcagccggagaacaactacaagaccacgcctcccgtgctggactccgacggctccttcttcctctacagcaagctcaccgtggacaagagcagatggcagcaggggaacgtcttctcatgctccgtgatgcacgaggctctgcacaaccactacacgcagaagtccctctccctgtctccgggtaaaggcggatcacatcaccatcaccatcaccatcactagtga

SEQ ID NO: 398 - protein, 887 aa, Artificial Sequence
  Synthetic sequence
MYRMQLLSCIALSLALVTNSPKYVKQNTLKLATGGGGSGSGGGGSGGGGGDTRPRFLWQHKFECHFFNGTERVRLLERCIYNQEESVRFDSDVGEYRAVTELGRPDAEYWNSQKDLLEQRRAAVDTYCRHNYGVGESFTVQRRVEPGGGGSIKEEHVIIQAEFYLNPDQSGEFMFDFDGDEIFHVDMAKKETVWRLEEFGRFASFEAQGALANIAVDKANLEIMTKRSNYTPITNVPPEVTVLTNSPVELREPNVLICFIDKFTPPVVNVTWLRNGKPVTTGVSETVFLPREDHLFRKFHYLPFLPSTEDVYDCRVEHWGLDEPLLKHWEFDAGGGGSGGGGSGGGGSGGGGSAPTSSSTKKTQLQLEALLLDLQMILNGINNYKNPKLTRMLTAKFYMPKKATELKHLQCLEEELKPLEEVLNLAQSKNFHLRPRDLISNINVIVLELKGSETTFMCEYADETATIVEFLNRWITFCQSIISTLTGGGGSGGGGSGGGGSGGGGSAPTSSSTKKTQLQLEALLLDLQMILNGINNYKNPKLTRMLTAKFYMPKKATELKHLQCLEEELKPLEEVLNLAQSKNFHLRPRDLISNINVIVLELKGSETTFMCEYADETATIVEFLNRWITFCQSIISTLTGGGGSAAAGGDKTHTCPPCPAPELLGGPSVFLFPPKPKDTLMISRTPEVTCVVVDVSHEDPEVKFNWYVDGVEVHNAKTKPREEQYASTYRVVSVLTVLHQDWLNGKEYKCKVSNKALPAPIEKTISKAKGQPREPQVYTLPPSREEMTKNQVSLTCLVKGFYPSDIAVEWESNGQPENNYKTTPPVLDSDGSFFLYSKLTVDKSRWQQGNVFSCSVMHEALHNHYTQKSLSLSPGKGGSHHHHHHHH

SEQ ID NO: 399 - DNA, 2667 bp, Artificial Sequence
  Synthetic sequence
atgtacaggatgcaactcctgtcttgcattgcactaagtcttgcacttgtcacaaacagtccgaaatatgtaaaacagaataccctgaaattggcaacaggaggtggcggatccggctccggtggaggtggctcaggaggcggcggcggggacacccgaccacgtttcttgtggcagcataagtttgaatgtcatttcttcaatgggacggagcgggtgcggttgctggaaagatgcatctataaccaagaggagtccgtgcgcttcgacagcgacgtgggggagtaccgggcggtgacggagctggggcggcctgatgccgagtactggaacagccagaaggacctcctggagcagaggcgggccgcggtggacacctactgcagacacaactacggggttggtgagagcttcacagtgcagcggcgagttgagcctggtggtggaggttcaatcaaagaagaacatgtgatcatccaggccgagttctatctgaatcctgaccaatcaggcgagtttatgtttgactttgatggtgatgagattttccatgtggatatggcaaagaaggagacggtctggcggcttgaagaatttggacgatttgccagctttgaggctcaaggtgcattggccaacatagctgtggacaaagccaacctggaaatcatgacaaagcgctccaactatactccgatcaccaatgtacctccagaggtaactgtgctcacaaacagccctgtggaactgagagagcccaacgtcctcatctgtttcatagacaagttcaccccaccagtggtcaatgtcacgtggcttcgaaatggaaaacctgtcaccacaggagtgtcagagacagtcttcctgcccagggaagaccaccttttccgcaagttccactatctccccttcctgccctcaactgaggacgtttacgactgcagggtggagcactggggcttggatgagcctcttctcaagcactgggagtttgatgctggaggcggaggatctggtggtggaggttctggtggtgggggatctggaggcggaggatctgcacctacttcaagttctacaaagaaaacacagctacaactggaggcattactgctggatttacagatgattttgaatggaattaataattacaagaatcccaaactcaccaggatgctcacagcaaagttttacatgcccaagaaggccacagaactgaaacatcttcagtgtctagaagaagaactcaaacctctggaggaagtgctaaatttagctcaaagcaaaaactttcacttaagacccagggacttaatcagcaatatcaacgtaatagttctggaactaaagggatctgaaacaacattcatgtgtgaatatgctgatgagacagcaaccattgtagaatttctgaacagatggattaccttttgtcaaagcatcatctcaacactgactggaggcggaggatctggtggtggaggttctggtggtgggggatctggaggcggaggatctgcacctacttcaagttctacaaagaaaacacagctacaactggaggcattactgctggatttacagatgattttgaatggaattaataattacaagaatcccaaactcaccaggatgctcacagcaaagttttacatgcccaagaaggccacagaactgaaacatcttcagtgtctagaagaagaactcaaacctctggaggaagtgctaaatttagctcaaagcaaaaactttcacttaagacccagggacttaatcagcaatatcaacgtaatagttctggaactaaagggatctgaaacaacattcatgtgtgaatatgctgatgagacagcaaccattgtagaatttctgaacagatggattaccttttgtcaaagcatcatctcaacactgactggaggcggaggatctgcagctgcgggtggcgacaaaactcacacatgcccaccgtgcccagcacctgaactcctggggggaccgtcagtcttcctcttccccccaaaacccaaggacaccctcatgatctcccggacccctgaggtcacatgcgtggtggtggacgtgagccacgaagaccctgaggtcaagttcaactggtacgtggacggcgtggaggtgcataatgccaagacaaagccgcgggaggagcagtacgcaagcacgtaccgtgtggtcagcgtcctcaccgtcctgcaccaggactggctgaatggcaaggagtacaagtgcaaggtctccaacaaagccctcccagcccccatcgagaaaaccatctccaaagccaaagggcagccccgagaaccacaggtgtacaccctgcccccatcccgggaggagatgaccaagaaccaggtcagcctgacctgcctggtcaaaggcttctatcccagcgacatcgccgtggagtgggagagcaatgggcagccggagaacaactacaagaccacgcctcccgtgctggactccgacggctccttcttcctctacagcaagctcaccgtggacaagagcagatggcagcaggggaacgtcttctcatgctccgtgatgcacgaggctctgcacaaccactacacgcagaagtccctctccctgtctccgggtaaaggcggatcacatcaccatcaccatcaccatcactagtga

SEQ ID NO: 400 - protein, 640 aa, Artificial Sequence
  Synthetic sequence
MYRMQLLSCIALSLALVTNSLPLKMLNIPSINVHGGGGSGSGGGGSGGGGGDTRPRFLWQHKFECHFFNGTERVRLLERCIYNQEESVRFDSDVGEYRAVTELGRPAAEYWNSQKDLLEQRRAAVDTYCRHNYGVGESFTVQRGGGGSIKEEHVIIQAEFYLNPDQSGEFMFDFDGDEIFHVDMAKKETVWRLEEFGRFASFEAQGALANIAVDKANLEIMTKRSNYTPITNVPPEVTVLTNSPVELREPNVLICFIDKFTPPVVNVTWLRNGKPVTTGVSETVFLPREDHLFRKFHYLPFLPSTEDVYDCRVEHWGLDEPLLKHWEFDAPSPLPETGGGGSGGGGSLEIRAAFLRQRNTALRTEVAELEQEVQRLENEVSQYETRYGPLGGGKGGSAAAGGDKTHTCPPCPAPELLGGPSVFLFPPKPKDTLMISRTPEVTCVVVDVSHEDPEVKFNWYVDGVEVHNAKTKPREEQYASTYRVVSVLTVLHQDWLNGKEYKCKVSNKALPAPIEKTISKAKGQPREPQVYTLPPSREEMTKNQVSLTCLVKGFYPSDIAVEWESNGQPENNYKTTPPVLDSDGSFFLYSKLTVDKSRWQQGNVFSCSVMHEALHNHYTQKSLSLSPGKGGSHHHHHHHH

SEQ ID NO: 401 - DNA, 1926 bp, Artificial Sequence
  Synthetic sequence
atgtacaggatgcaactcctgtcttgcattgcactaagtcttgcacttgtcacaaacagtcttccgctcaaaatgcttaacataccttccattaatgtccacggaggtggcggatccggctccggtggaggtggctcaggaggcggcggcggggacacccgaccacgtttcttgtggcagcataagtttgaatgtcatttcttcaatgggacggagcgggtgcggttgctggaaagatgcatctataaccaagaggagtccgtgcgcttcgacagcgacgtgggggagtaccgggcggtgacggagctggggcggcctgcagccgagtactggaacagccagaaggacctcctggagcagaggcgggccgcggtggacacctactgcagacacaactacggggttggtgagagcttcacagtgcagcggggtggtggaggttcaatcaaagaagaacatgtgatcatccaggccgagttctatctgaatcctgaccaatcaggcgagtttatgtttgactttgatggtgatgagattttccatgtggatatggcaaagaaggagacggtctggcggcttgaagaatttggacgatttgccagctttgaggctcaaggtgcattggccaacatagctgtggacaaagccaacctggaaatcatgacaaagcgctccaactatactccgatcaccaatgtacctccagaggtaactgtgctcacaaacagccctgtggaactgagagagcccaacgtcctcatctgtttcatagacaagttcaccccaccagtggtcaatgtcacgtggcttcgaaatggaaaacctgtcaccacaggagtgtcagagacagtcttcctgcccagggaagaccaccttttccgcaagttccactatctccccttcctgccctcaactgaggacgtttacgactgcagggtggagcactggggcttggatgagcctcttctcaagcactgggagtttgatgctccaagccctctcccagagactggtggaggtggctcaggaggcggcggcagcctggagatccgggccgccttcctgcggcagcggaacaccgccctgcggaccgaggtggccgagctggagcaggaggtgcagcggctggagaacgaggtgtcccagtacgagacccggtacggccccctgggcggcggcaagggcggatcagcagctgcgggtggcgacaaaactcacacatgcccaccgtgcccagcacctgaactcctggggggaccgtcagtcttcctcttccccccaaaacccaaggacaccctcatgatctcccggacccctgaggtcacatgcgtggtggtggacgtgagccacgaagaccctgaggtcaagttcaactggtacgtggacggcgtggaggtgcataatgccaagacaaagccgcgggaggagcagtacgcaagcacgtaccgtgtggtcagcgtcctcaccgtcctgcaccaggactggctgaatggcaaggagtacaagtgcaaggtctccaacaaagccctcccagcccccatcgagaaaaccatctccaaagccaaagggcagccccgagaaccacaggtgtacaccctgcccccatcccgggaggagatgaccaagaaccaggtcagcctgacctgcctggtcaaaggcttctatcccagcgacatcgccgtggagtgggagagcaatgggcagccggagaacaactacaagaccacgcctcccgtgctggactccgacggctccttcttcctctacagcaagctcaccgtggacaagagcagatggcagcaggggaacgtcttctcatgctccgtgatgcacgaggctctgcacaaccactacacgcagaagtccctctccctgtctccgggtaaaggcggatcacatcaccatcaccatcaccatcactagtga

SEQ ID NO: 402 - protein, 644 aa, Artificial Sequence
  Synthetic sequence
MYRMQLLSCIALSLALVTNSGAGSLQPLALEGSLQKRGGGGGSGSGGGGSGGGGGDTRPRFLEQVKHECHFFNGTERVRFLDRYFYHQEEYVRFDSDVGEYRAVTELGRPDAEYWNSQKDLLEQKRAAVDTYCRHNYGVGESFTVQRGGGGSIKEEHVIIQAEFYLNPDQSGEFMFDFDGDEIFHVDMAKKETVWRLEEFGRFASFEAQGALANIAVDKANLEIMTKRSNYTPITNVPPEVTVLTNSPVELREPNVLICFIDKFTPPVVNVTWLRNGKPVTTGVSETVFLPREDHLFRKFHYLPFLPSTEDVYDCRVEHWGLDEPLLKHWEFDAPSPLPETGGGGSGGGGSLEIRAAFLRQRNTALRTEVAELEQEVQRLENEVSQYETRYGPLGGGKGGSAAAGGDKTHTCPPCPAPELLGGPSVFLFPPKPKDTLMISRTPEVTCVVVDVSHEDPEVKFNWYVDGVEVHNAKTKPREEQYASTYRVVSVLTVLHQDWLNGKEYKCKVSNKALPAPIEKTISKAKGQPREPQVYTLPPSREEMTKNQVSLTCLVKGFYPSDIAVEWESNGQPENNYKTTPPVLDSDGSFFLYSKLTVDKSRWQQGNVFSCSVMHEALHNHYTQKSLSLSPGKGGSHHHHHHHH

SEQ ID NO: 403 - DNA, 1938 bp, Artificial Sequence
  Synthetic sequence
atgtacaggatgcaactcctgtcttgcattgcactaagtcttgcacttgtcacaaacagtggggcagggtcactccaaccgttggcgctggaaggctctcttcagaagcgaggtggaggtggcggatccggctccggtggaggtggctcaggaggcggcggcggggacacccgaccacgtttcttggagcaggttaaacatgagtgtcatttcttcaacgggacggagcgggtgcggttcctggacagatacttctatcaccaagaggagtacgtgcgcttcgacagcgacgtgggggagtaccgggcggtgacggagctggggcggcctgatgccgagtactggaacagccagaaggacctcctggagcagaagcgggccgcggtggacacctactgcagacacaactacggggttggtgagagcttcacagtgcagcggggtggtggaggttcaatcaaagaagaacatgtgatcatccaggccgagttctatctgaatcctgaccaatcaggcgagtttatgtttgactttgatggtgatgagattttccatgtggatatggcaaagaaggagacggtctggcggcttgaagaatttggacgatttgccagctttgaggctcaaggtgcattggccaacatagctgtggacaaagccaacctggaaatcatgacaaagcgctccaactatactccgatcaccaatgtacctccagaggtaactgtgctcacaaacagccctgtggaactgagagagcccaacgtcctcatctgtttcatagacaagttcaccccaccagtggtcaatgtcacgtggcttcgaaatggaaaacctgtcaccacaggagtgtcagagacagtcttcctgcccagggaagaccaccttttccgcaagttccactatctccccttcctgccctcaactgaggacgtttacgactgcagggtggagcactggggcttggatgagcctcttctcaagcactgggagtttgatgctccaagccctctcccagagactggtggaggtggctcaggaggcggcggcagcctggagatccgggccgccttcctgcggcagcggaacaccgccctgcggaccgaggtggccgagctggagcaggaggtgcagcggctggagaacgaggtgtcccagtacgagacccggtacggccccctgggcggcggcaagggcggatcagcagctgcgggtggcgacaaaactcacacatgcccaccgtgcccagcacctgaactcctggggggaccgtcagtcttcctcttccccccaaaacccaaggacaccctcatgatctcccggacccctgaggtcacatgcgtggtggtggacgtgagccacgaagaccctgaggtcaagttcaactggtacgtggacggcgtggaggtgcataatgccaagacaaagccgcgggaggagcagtacgcaagcacgtaccgtgtggtcagcgtcctcaccgtcctgcaccaggactggctgaatggcaaggagtacaagtgcaaggtctccaacaaagccctcccagcccccatcgagaaaaccatctccaaagccaaagggcagccccgagaaccacaggtgtacaccctgcccccatcccgggaggagatgaccaagaaccaggtcagcctgacctgcctggtcaaaggcttctatcccagcgacatcgccgtggagtgggagagcaatgggcagccggagaacaactacaagaccacgcctcccgtgctggactccgacggctccttcttcctctacagcaagctcaccgtggacaagagcagatggcagcaggggaacgtcttctcatgctccgtgatgcacgaggctctgcacaaccactacacgcagaagtccctctccctgtctccgggtaaaggcggatcacatcaccatcaccatcaccatcactagtga

SEQ ID NO: 404 - protein, 493 aa, Artificial Sequence
  Synthetic sequence
MYRMQLLSCIALSLALVTNSAPTSSSTKKTQLQLEALLLDLQMILNGINNYKNPKLTRMLTAKFYMPKKATELKHLQCLEEELKPLEEVLNLAQSKNFHLRPRDLISNINVIVLELKGSETTFMCEYADETATIVEFLNRWITFCQSIISTLTGGGGSGGGGSGGGGSGGGGSAPTSSSTKKTQLQLEALLLDLQMILNGINNYKNPKLTRMLTAKFYMPKKATELKHLQCLEEELKPLEEVLNLAQSKNFHLRPRDLISNINVIVLELKGSETTFMCEYADETATIVEFLNRWITFCQSIISTLTGGGGSGGGGSGGGGSGGGGSVYPEVTVYPAKTQPLQHHNLLVCSVNGFYPASIEVRWFRNGQEEKTGVVSTGLIQNGDWTFQTLVMLETVPRSGEVYTCQVEHPSLTSPLTVEWRARSESAQSKMGGGGSGGGGSGGGGSLEIEAAFLERENTALETRVAELRQRVQRLRNRVSQYRTRYGPLGGGK

SEQ ID NO: 405 - DNA, 1485 bp, Artificial Sequence
  Synthetic sequence
atgtacaggatgcaactcctgtcttgcattgcactaagtcttgcacttgtcacaaacagtgcacctacttcaagttctacaaagaaaacacagctacaactggaggcattactgctggatttacagatgattttgaatggaattaataattacaagaatcccaaactcaccaggatgctcacagcaaagttttacatgcccaagaaggccacagaactgaaacatcttcagtgtctagaagaagaactcaaacctctggaggaagtgctaaatttagctcaaagcaaaaactttcacttaagacccagggacttaatcagcaatatcaacgtaatagttctggaactaaagggatctgaaacaacattcatgtgtgaatatgctgatgagacagcaaccattgtagaatttctgaacagatggattaccttttgtcaaagcatcatctcaacactgactggaggcggaggatctggtggtggaggttctggtggtgggggatctggaggcggaggatctgcacctacttcaagttctacaaagaaaacacagctacaactggaggcattactgctggatttacagatgattttgaatggaattaataattacaagaatcccaaactcaccaggatgctcacagcaaagttttacatgcccaagaaggccacagaactgaaacatcttcagtgtctagaagaagaactcaaacctctggaggaagtgctaaatttagctcaaagcaaaaactttcacttaagacccagggacttaatcagcaatatcaacgtaatagttctggaactaaagggatctgaaacaacattcatgtgtgaatatgctgatgagacagcaaccattgtagaatttctgaacagatggattaccttttgtcaaagcatcatctcaacactgactggaggcggaggatctggtggtggaggttctggtggtgggggatctggaggcggaggatctgtctatcctgaggtgactgtgtatcctgcaaagacccagcccctgcagcaccacaacctcctggtctgctctgtgaatggtttctatccagccagcattgaagtcaggtggttccggaacggccaggaagagaagactggggtggtgtccacaggcctgatccagaatggagactggaccttccagaccctggtgatgctggaaacagttcctcggagtggagaggtttacacctgccaagtggagcacccaagcctgacgagccctctcacagtggaatggagagcacggtctgaatctgcacagagcaagatgggtggaggtggctcaggaggcggcggcagcggtggaggagggagcctggagatcgaggccgccttcctggagcgggagaacaccgccctggagacccgggtggccgagctgcggcagcgggtgcagcggctgcggaaccgggtgtcccagtaccggacccggtacggccccctgggcggcggcaagtagtga

SEQ ID NO: 406 - protein, 602 aa, Artificial Sequence
  Synthetic sequence
MYRMQLLSCIALSLALVTNSPKYVKQNTLKLATGGGGSGSGGGGSGGGGGDTRPRFLWQHKFECHFFNGTERVRLLERCIYNQEESVRFDSDVGEYRAVTELGRPDAEYWNSQKDLLEQRRAAVDTYCRHNYGVGESFTVQRGGGGSIKEEHVIIQAEFYLNPDQSGEFMFDFDGDEIFHVDMAKKETVWRLEEFGRFASFEAQGALANIAVDKANLEIMTKRSNYTPITNVPPEVTVLTNSPVELREPNVLICFIDKFTPPVVNVTWLRNGKPVTTGVSETVFLPREDHLFRKFHYLPFLPSTEDVYDCRVEHWGLDEPLLKHWEFDAGGGGSGGGGSGGGGSGGGGSGGGGSGGGGSAAAGGDKTHTCPPCPAPELLGGPSVFLFPPKPKDTLMISRTPEVTCVVVDVSHEDPEVKFNWYVDGVEVHNAKTKPREEQYASTYRVVSVLTVLHQDWLNGKEYKCKVSNKALPAPIEKTISKAKGQPREPQVYTLPPSREEMTKNQVSLTCLVKGFYPSDIAVEWESNGQPENNYKTTPPVLDSDGSFFLYSKLTVDKSRWQQGNVFSCSVMHEALHNHYTQKSLSLSPGKGGSHHHHHHHH

SEQ ID NO: 407 - DNA, 1812 bp, Artificial Sequence
  Synthetic sequence
atgtacaggatgcaactcctgtcttgcattgcactaagtcttgcacttgtcacaaacagtccgaaatatgtaaaacagaataccctgaaattggcaacaggaggtggcggatccggctccggtggaggtggctcaggaggcggcggcggggacacccgaccacgtttcttgtggcagcataagtttgaatgtcatttcttcaatgggacggagcgggtgcggttgctggaaagatgcatctataaccaagaggagtccgtgcgcttcgacagcgacgtgggggagtaccgggcggtgacggagctggggcggcctgatgccgagtactggaacagccagaaggacctcctggagcagaggcgggccgcggtggacacctactgcagacacaactacggggttggtgagagcttcacagtgcagcggggtggtggaggttcaatcaaagaagaacatgtgatcatccaggccgagttctatctgaatcctgaccaatcaggcgagtttatgtttgactttgatggtgatgagattttccatgtggatatggcaaagaaggagacggtctggcggcttgaagaatttggacgatttgccagctttgaggctcaaggtgcattggccaacatagctgtggacaaagccaacctggaaatcatgacaaagcgctccaactatactccgatcaccaatgtacctccagaggtaactgtgctcacaaacagccctgtggaactgagagagcccaacgtcctcatctgtttcatagacaagttcaccccaccagtggtcaatgtcacgtggcttcgaaatggaaaacctgtcaccacaggagtgtcagagacagtcttcctgcccagggaagaccaccttttccgcaagttccactatctccccttcctgccctcaactgaggacgtttacgactgcagggtggagcactggggcttggatgagcctcttctcaagcactgggagtttgatgctggaggcggaggatctggaggcggaggatctggtggtggaggttctggtggtgggggatctggaggcggaggatctggaggcggaggatctgcagctgcgggtggcgacaaaactcacacatgcccaccgtgcccagcacctgaactcctggggggaccgtcagtcttcctcttccccccaaaacccaaggacaccctcatgatctcccggacccctgaggtcacatgcgtggtggtggacgtgagccacgaagaccctgaggtcaagttcaactggtacgtggacggcgtggaggtgcataatgccaagacaaagccgcgggaggagcagtacgcaagcacgtaccgtgtggtcagcgtcctcaccgtcctgcaccaggactggctgaatggcaaggagtacaagtgcaaggtctccaacaaagccctcccagcccccatcgagaaaaccatctccaaagccaaagggcagccccgagaaccacaggtgtacaccctgcccccatcccgggaggagatgaccaagaaccaggtcagcctgacctgcctggtcaaaggcttctatcccagcgacatcgccgtggagtgggagagcaatgggcagccggagaacaactacaagaccacgcctcccgtgctggactccgacggctccttcttcctctacagcaagctcaccgtggacaagagcagatggcagcaggggaacgtcttctcatgctccgtgatgcacgaggctctgcacaaccactacacgcagaagtccctctccctgtctccgggtaaaggcggatcacatcaccatcaccatcaccatcactagtga

SEQ ID NO: 408 - protein, 491 aa, Artificial Sequence
  Synthetic sequence
MYRMQLLSCIALSLALVTNSAPTSSSTKKTQLQLEALLLDLQMILNGINNYKNPKLTRMLTAKFYMPKKATELKHLQCLEEELKPLEEVLNLAQSKNFHLRPRDLISNINVIVLELKGSETTFMCEYADETATIVEFLNRWITFCQSIISTLTGGGGSGGGGSGGGGSGGGGSAPTSSSTKKTQLQLEALLLDLQMILNGINNYKNPKLTRMLTAKFYMPKKATELKHLQCLEEELKPLEEVLNLAQSKNFHLRPRDLISNINVIVLELKGSETTFMCEYADETATIVEFLNRWITFCQSIISTLTGGGGSGGGGSGGGGSGGGGSPKVTVYPSKTQPLQHHNLLVCSVSGFYPGSIEVRWFRNGQEEKAGVVSTGLIQNGDWTFQTLVMLETVPRSGEVYTCQVEHPSVTSPLTVEWRARSESAQSKMGGGGSGGGGSGGGGSLEIEAAFLERENTALETRVAELRQRVQRLRNRVSQYRTRYGPLGGGK

SEQ ID NO: 409 - DNA, 1479 bp, Artificial Sequence
  Synthetic sequence
atgtacaggatgcaactcctgtcttgcattgcactaagtcttgcacttgtcacaaacagtgcacctacttcaagttctacaaagaaaacacagctacaactggaggcattactgctggatttacagatgattttgaatggaattaataattacaagaatcccaaactcaccaggatgctcacagcaaagttttacatgcccaagaaggccacagaactgaaacatcttcagtgtctagaagaagaactcaaacctctggaggaagtgctaaatttagctcaaagcaaaaactttcacttaagacccagggacttaatcagcaatatcaacgtaatagttctggaactaaagggatctgaaacaacattcatgtgtgaatatgctgatgagacagcaaccattgtagaatttctgaacagatggattaccttttgtcaaagcatcatctcaacactgactggaggcggaggatctggtggtggaggttctggtggtgggggatctggaggcggaggatctgcacctacttcaagttctacaaagaaaacacagctacaactggaggcattactgctggatttacagatgattttgaatggaattaataattacaagaatcccaaactcaccaggatgctcacagcaaagttttacatgcccaagaaggccacagaactgaaacatcttcagtgtctagaagaagaactcaaacctctggaggaagtgctaaatttagctcaaagcaaaaactttcacttaagacccagggacttaatcagcaatatcaacgtaatagttctggaactaaagggatctgaaacaacattcatgtgtgaatatgctgatgagacagcaaccattgtagaatttctgaacagatggattaccttttgtcaaagcatcatctcaacactgactggaggcggaggatctggtggtggaggttctggtggtgggggatctggaggcggaggatctcctaaggtgactgtgtatccttcaaagacccagcccctgcagcaccacaacctcctggtctgctctgtgagtggtttctatccaggcagcattgaagtcaggtggttccggaacggccaggaagagaaggctggggtggtgtccacaggcctgatccagaatggagattggaccttccagaccctggtgatgctggaaacagttcctcggagtggagaggtttacacctgccaagtggagcacccaagtgtgacgagccctctcacagtggaatggagagcacggtctgaatctgcacagagcaagatgggtggaggtggctcaggaggcggcggcagcggtggaggagggagcctggagatcgaggccgccttcctggagcgggagaacaccgccctggagacccgggtggccgagctgcggcagcgggtgcagcggctgcggaaccgggtgtcccagtaccggacccggtacggccccctgggcggcggcaagtagtga

SEQ ID NO: 410 - protein, 429 aa, Artificial Sequence
  Synthetic sequence
MYRMQLLSCIALSLALVTNSAPTSSSTKKTQLQLEALLLDLQMILNGINNYKNPKLTRMLTAKFYMPKKATELKHLQCLEEELKPLEEVLNLAQSKNFHLRPRDLISNINVIVLELKGSETTFMCEYADETATIVEFLNRWITFCQSIISTLTGGGGSGGGGSGGGGSGGGGSAPTSSSTKKTQLQLEALLLDLQMILNGINNYKNPKLTRMLTAKFYMPKKATELKHLQCLEEELKPLEEVLNLAQSKNFHLRPRDLISNINVIVLELKGSETTFMCEYADETATIVEFLNRWITFCQSIISTLTGGGGSGGGGSGGGGSGGGGSPKVTVYPSKTQPLQHHNLLVCSVSGFYPGSIEVRWFRNGQEEKAGVVSTGLIQNGDWTFQTLVMLETVPRSGEVYTCQVEHPSVTSPLTVEWRARSESAQSKM

SEQ ID NO: 411 - DNA, 1293 bp, Artificial Sequence
  Synthetic sequence
atgtacaggatgcaactcctgtcttgcattgcactaagtcttgcacttgtcacaaacagtgcacctacttcaagttctacaaagaaaacacagctacaactggaggcattactgctggatttacagatgattttgaatggaattaataattacaagaatcccaaactcaccaggatgctcacagcaaagttttacatgcccaagaaggccacagaactgaaacatcttcagtgtctagaagaagaactcaaacctctggaggaagtgctaaatttagctcaaagcaaaaactttcacttaagacccagggacttaatcagcaatatcaacgtaatagttctggaactaaagggatctgaaacaacattcatgtgtgaatatgctgatgagacagcaaccattgtagaatttctgaacagatggattaccttttgtcaaagcatcatctcaacactgactggaggcggaggatctggtggtggaggttctggtggtgggggatctggaggcggaggatctgcacctacttcaagttctacaaagaaaacacagctacaactggaggcattactgctggatttacagatgattttgaatggaattaataattacaagaatcccaaactcaccaggatgctcacagcaaagttttacatgcccaagaaggccacagaactgaaacatcttcagtgtctagaagaagaactcaaacctctggaggaagtgctaaatttagctcaaagcaaaaactttcacttaagacccagggacttaatcagcaatatcaacgtaatagttctggaactaaagggatctgaaacaacattcatgtgtgaatatgctgatgagacagcaaccattgtagaatttctgaacagatggattaccttttgtcaaagcatcatctcaacactgactggaggcggaggatctggtggtggaggttctggtggtgggggatctggaggcggaggatctcctaaggtgactgtgtatccttcaaagacccagcccctgcagcaccacaacctcctggtctgctctgtgagtggtttctatccaggcagcattgaagtcaggtggttccggaacggccaggaagagaaggctggggtggtgtccacaggcctgatccagaatggagattggaccttccagaccctggtgatgctggaaacagttcctcggagtggagaggtttacacctgccaagtggagcacccaagtgtgacgagccctctcacagtggaatggagagcacggtctgaatctgcacagagcaagatgtagtga

SEQ ID NO: 412 - protein, 328 aa, Artificial Sequence
  Synthetic sequence
MYRMQLLSCIALSLALVTNSPKYVKQNTLKLATGGGGSGGGGSGGGGSGDTRPRFLWQHKFECHFFNGTERVRLLERCIYNQEESVRFDSDVGEYRAVTELGRPDAEYWNSQKDLLEQRRAAVDTYCRHNYGVGESFTVQRGGGGSIKEEHVIIQAEFYLNPDQSGEFMFDFDGDEIFHVDMAKKETVWRLEEFGRFASFEAQGALANIAVDKANLEIMTKRSNYTPITNVPPEVTVLTNSPVELREPNVLICFIDKFTPPVVNVTWLRNGKPVTTGVSETVFLPREDHLFRKFHYLPFLPSTEDVYDCRVEHWGLDEPLLKHWEFDA

SEQ ID NO: 413 - DNA, 984 bp, Artificial sequence
  synthetic sequence
atgtacaggatgcaactcctgtcttgcattgcactaagtcttgcacttgtcacaaacagtccgaaatatgtaaaacagaataccctgaaattggcaacaggaggtggcggatccggtggaggtggctcaggaggcggcggctctggggacacccgaccacgtttcttgtggcagcataagtttgaatgtcatttcttcaatgggacggagcgggtgcggttgctggaaagatgcatctataaccaagaggagtccgtgcgcttcgacagcgacgtgggggagtaccgggcggtgacggagctggggcggcctgatgccgagtactggaacagccagaaggacctcctggagcagaggcgggccgcggtggacacctactgcagacacaactacggggttggtgagagcttcacagtgcagcggggtggtggaggttcaatcaaagaagaacatgtgatcatccaggccgagttctatctgaatcctgaccaatcaggcgagtttatgtttgactttgatggtgatgagattttccatgtggatatggcaaagaaggagacggtctggcggcttgaagaatttggacgatttgccagctttgaggctcaaggtgcattggccaacatagctgtggacaaagccaacctggaaatcatgacaaagcgctccaactatactccgatcaccaatgtacctccagaggtaactgtgctcacaaacagccctgtggaactgagagagcccaacgtcctcatctgtttcatagacaagttcaccccaccagtggtcaatgtcacgtggcttcgaaatggaaaacctgtcaccacaggagtgtcagagacagtcttcctgcccagggaagaccaccttttccgcaagttccactatctccccttcctgccctcaactgaggacgtttacgactgcagggtggagcactggggcttggatgagcctcttctcaagcactgggagtttgatgct

SEQ ID NO: 414 - protein, 688 aa, Artificial sequence
  synthetic sequence
MYRMQLLSCIALSLALVTNSAPTSSSTKKTQLQLEALLLDLQMILNGINNYKNPKLTRMLTAKFYMPKKATELKHLQCLEEELKPLEEVLNLAQSKNFHLRPRDLISNINVIVLELKGSETTFMCEYADETATIVEFLNRWITFCQSIISTLTGGGGSGGGGSGGGGSGGGGSAPTSSSTKKTQLQLEALLLDLQMILNGINNYKNPKLTRMLTAKFYMPKKATELKHLQCLEEELKPLEEVLNLAQSKNFHLRPRDLISNINVIVLELKGSETTFMCEYADETATIVEFLNRWITFCQSIISTLTGGGGSGGGGSGGGGSGGGGSVEPKVTVYPSKTQPLQHHNLLVCSVSGFYPGSIEVRWFRNGQEEKAGVVSTGLIQNGDWTFQTLVMLETVPRSGEVYTCQVEHPSVTSPLTVEWRARSESAQSKMGGGGSGGGGSGGGGSGGGGSGGGGSGGGGSDKTHTCPPCPAPEAAGGPSVFLFPPKPKDTLMISRTPEVTCVVVDVSHEDPEVKFNWYVDGVEVHNAKTKPREEQYNSTYRVVSVLTVLHQDWLNGKEYKCKVSNKALPAPIEKTISKAKGQPREPQVYTLPPSREEMTKNQVSLTCLVKGFYPSDIAVEWESNGQPENNYKTTPPVLDSDGSFFLYSKLTVDKSRWQQGNVFSCSVMHEALHNHYTQKSLSLSPGK

SEQ ID NO: 415 - DNA, 2064 bp, Artificial sequence
  synthetic sequence
atgtacaggatgcaactcctgtcttgcattgcactaagtcttgcacttgtcacaaacagtgcccctacttccagctccaccaagaagacgcagcttcagctggaagcactgctgctcgatctgcagatgatactgaatggcattaacaactacaaaaaccccaagctcactcgcatgctgaccgctaaattctacatgcccaagaaggctacggaactgaagcacctgcagtgccttgaggaggaactcaagccactcgaggaggtgctgaacctggcacagtcaaagaactttcacctgcggccaagagacctgatttcgaacatcaacgtgattgtgctggaattgaagggctcagaaactacgttcatgtgcgagtacgccgacgaaactgctactatcgtggagttcttgaaccgctggatcacgttctgccagagcattatttcaactcttaccggtggaggtggttctggaggtggtggatcaggaggaggtggctccgggggtggaggtagcgctcccacgtcatcctccactaaaaagacccagctgcaactcgaggcactgttgctggacctccagatgattctgaacggaatcaacaactataagaacccgaagctgactagaatgttgactgccaaattttatatgccaaagaaggcaactgagttgaagcatctgcaatgcctggaagaggagctgaagccactggaagaggtgcttaacctcgctcagtccaagaacttccatctgcgcccacgggaccttatctccaacattaacgtgatcgtgctggaactgaagggatccgaaaccacttttatgtgcgaatacgctgacgaaaccgccactatcgtcgagttcctgaacaggtggatcaccttctgccagtccattatctccaccctcaccggtggaggtggttctggaggtggtggatcaggaggaggtggctccgggggtggaggtagcgttgagcctaaggtgactgtgtatccttcaaagacccagcccctgcagcaccacaacctcctggtctgctctgtgagtggtttctatccaggcagcattgaagtcaggtggttccggaacggccaggaagagaaggctggggtggtgtccacaggcctgatccagaatggagattggaccttccagaccctggtgatgctggaaacagttcctcggagtggagaggtttacacctgccaagtggagcacccaagtgtgacgagccctctcacagtggaatggagagcacggtctgaatctgcacagagcaagatgggaggcggaggatctggaggcggaggatctggtggtggaggttctggtggtgggggatctggaggcggaggatctggaggcggaggatctgacaaaactcacacatgcccaccgtgcccagcacctgaagccgccgggggaccgtcagtcttcctcttccccccaaaacccaaggacaccctcatgatctcccggacccctgaggtcacatgcgtggtggtggacgtgagccacgaagaccctgaggtcaagttcaactggtacgtggacggcgtggaggtgcataatgccaagacaaagccgcgggaggagcagtacaacagcacgtaccgtgtggtcagcgtcctcaccgtcctgcaccaggactggctgaatggcaaggagtacaagtgcaaggtctccaacaaagccctcccagcccccatcgagaaaaccatctccaaagccaaagggcagccccgagaaccacaggtgtacaccctgcccccatcccgggaggagatgaccaagaaccaggtcagcctgacctgcctggtcaaaggcttctatcccagcgacatcgccgtggagtgggagagcaatgggcagccggagaacaactacaagaccacgcctcccgtgctggactccgacggctccttcttcctctacagcaagctcaccgtggacaagagcagatggcagcaggggaacgtcttctcatgctccgtgatgcacgaggctctgcacaaccactacacgcagaagtccctctccctgtctccgggtaaa

SEQ ID NO: 416 - protein, 20 aa, Artificial Sequence
  Synthetic sequence
MYRMQLLSCIALSLALVTNS

SEQ ID NO: 417 - protein, 105 aa, Artificial Sequence; identical to SEQ ID NO: 311
  Synthetic sequence

SEQ ID NO: 418 - protein, 191 aa, Artificial Sequence
  Synthetic sequence
IEADHVGFYGTTVYQSPGDIGQYTHEFDGDELFYVDLDKKKTVWRLPEFGQLILFEPQGGLQNIAAEKHNLGILTKRSNFTPATNEAPQATVFPKSPVLLGQPNTLICFVDNIFPPVINITWLRNSKSVTDGVYETSFLVNRDHSFHKLSYLTFIPSDDDIYDCKVEHWGLEEPVLKHWEPEIPAPMSELT

SEQ ID NO: 419 - DNA, 2064 bp, Artificial Sequence; identical to SEQ ID NO: 415
  Synthetic sequence

SEQ ID NO: 420 - protein, 423 aa, Artificial Sequence
  Synthetic sequence
IKEEHVIIQAEFYLNPDQSGEFMFDFDGDEIFHVDMAKKETVWRLEEFGRFASFEAQGALANIAVDKANLEIMTKRSNYTPITNVPPEVTVLTNSPVELREPNVLICFIDKFTPPVVNVTWLRNGKPVTTGVSETVFLPREDHLFRKFHYLPFLPSTEDVYDCRVEHWGLDEPLLKHWEFDAPSPLPETGGSAAAGGDKTHTCPPCPAPEAAGGPSVFLFPPKPKDTLMISRTPEVTCVVVDVSHEDPEVKFNWYVDGVEVHNAKTKPREEQYNSTYRVVSVLTVLHQDWLNGKEYKCKVSNKALPAPIEKTISKAKGQPREPQVYTLPPSREEMTKNQVSLTCLVKGFYPSDIAVEWESNGQPENNYKTTPPVLDSDGSFFLYSKLTVDKSRWQQGNVFSCSVMHEALHNHYTQKSLSLSPG

SEQ ID NO: 421 - protein, 229 aa, Artificial Sequence
  Synthetic sequence
SLQPLALEGSLQSRGGGGGSGGGGSGGGGSGDTRPRFLEQVKHECHFFNGTERVRFLDRYFYHQEEYVRFDSDVGEYRAVTELGRPDAEYWNSQKDLLEQKRAAVDTYCRHNYGVGESFTVQRRVYPEVTVYPAKTQPLQHHNLLVCSVNGFYPASIEVRWFRNGQEEKTGVVSTGLIQNGDWTFQTLVMLETVPRSGEVYTCQVEHPSLTSPLTVEWRARSESAQSKM

SEQ ID NO: 422 - protein, 663 aa, Artificial Sequence
  Synthetic sequence
FTVTVPKDLYVVEYGSNMTIECKFPVEKQLDLAALIVYWEMEDKNIIQFVHGEEDLKVQHSSYRQRARLLKDQLSLGNAALQITDVKLQDAGVYRCMISYGGADYKRITVKVNAPYNKINQRILVVDPVTSEHELTCQAEGYPKAEVIWTSSDHQVLSGKTTTTNSKREEKLFNVTSTLRINTTTNEIFYCTFRRLDPEENHTAELVIPELPLAHPPNERGGGGSGGGGSGGGGSGGGGSIKEEHVIIQAEFYLNPDQSGEFMFDFDGDEIFHVDMAKKETVWRLEEFGRFASFEAQGALANIAVDKANLEIMTKRSNYTPITNVPPEVTVLTNSPVELREPNVLICFIDKFTPPVVNVTWLRNGKPVTTGVSETVFLPREDHLFRKFHYLPFLPSTEDVYDCRVEHWGLDEPLLKHWEFDAPSPLPETGGSAAAGGDKTHTCPPCPAPEAAGGPSVFLFPPKPKDTLMISRTPEVTCVVVDVSHEDPEVKFNWYVDGVEVHNAKTKPREEQYNSTYRVVSVLTVLHQDWLNGKEYKCKVSNKALPAPIEKTISKAKGQPREPQVYTLPPSREEMTKNQVSLTCLVKGFYPSDIAVEWESNGQPENNYKTTPPVLDSDGSFFLYSKLTVDKSRWQQGNVFSCSVMHEALHNHYTQKSLSLSPG

SEQ ID NO: 423 - protein, 675 aa, Artificial Sequence
  Synthetic sequence
IKEEHVIIQAEFYLNPDQSGEFMFDFDGDEIFHVDMAKKETVWRLEEFGRFASFEAQGALANIAVDKANLEIMTKRSNYTPITNVPPEVTVLTNSPVELREPNVLICFIDKFTPPVVNVTWLRNGKPVTTGVSETVFLPREDHLFRKFHYLPFLPSTEDVYDCRVEHWGLDEPLLKHWEFDAPSPLPETGGGGSGGGGSGGGGSGGGGSFTVTVPKDLYVVEYGSNMTIECKFPVEKQLDLAALIVYWEMEDKNIIQFVHGEEDLKVQHSSYRQRARLLKDQLSLGNAALQITDVKLQDAGVYRCMISYGGADYKRITVKVNAPYNKINQRILVVDPVTSEHELTCQAEGYPKAEVIWTSSDHQVLSGKTTTTNSKREEKLFNVTSTLRINTTTNEIFYCTFRRLDPEENHTAELVIPELPLAHPPNERGGGGSGGGGSGGGGSGGGGSDKTHTCPPCPAPEAAGGPSVFLFPPKPKDTLMISRTPEVTCVVVDVSHEDPEVKFNWYVDGVEVHNAKTKPREEQYNSTYRVVSVLTVLHQDWLNGKEYKCKVSNKALPAPIEKTISKAKGQPREPQVYTLPPSREEMTKNQVSLTCLVKGFYPSDIAVEWESNGQPENNYKTTPPVLDSDGSFFLYSKLTVDKSRWQQGNVFSCSVMHEALHNHYTQKSLSLSPG

SEQ ID NO: 424 - protein, 663 aa, Artificial Sequence
  Synthetic sequence
IKEEHVIIQAEFYLNPDQSGEFMFDFDGDEIFHVDMAKKETVWRLEEFGRFASFEAQGALANIAVDKANLEIMTKRSNYTPITNVPPEVTVLTNSPVELREPNVLICFIDKFTPPVVNVTWLRNGKPVTTGVSETVFLPREDHLFRKFHYLPFLPSTEDVYDCRVEHWGLDEPLLKHWEFDAPSPLPETGGSAAAGGDKTHTCPPCPAPEAAGGPSVFLFPPKPKDTLMISRTPEVTCVVVDVSHEDPEVKFNWYVDGVEVHNAKTKPREEQYNSTYRVVSVLTVLHQDWLNGKEYKCKVSNKALPAPIEKTISKAKGQPREPQVYTLPPSREEMTKNQVSLTCLVKGFYPSDIAVEWESNGQPENNYKTTPPVLDSDGSFFLYSKLTVDKSRWQQGNVFSCSVMHEALHNHYTQKSLSLSPGGGGGSGGGGSGGGGSGGGGSFTVTVPKDLYVVEYGSNMTIECKFPVEKQLDLAALIVYWEMEDKNIIQFVHGEEDLKVQHSSYRQRARLLKDQLSLGNAALQITDVKLQDAGVYRCMISYGGADYKRITVKVNAPYNKINQRILVVDPVTSEHELTCQAEGYPKAEVIWTSSDHQVLSGKTTTTNSKREEKLFNVTSTLRINTTTNEIFYCTFRRLDPEENHTAELVIPELPLAHPPNER

SEQ ID NO: 425 - protein, 464 aa, Artificial Sequence
  Synthetic sequence
FTVTVPKDLYVVEYGSNMTIECKFPVEKQLDLAALIVYWEMEDKNIIQFVHGEEDLKVQHSSYRQRARLLKDQLSLGNAALQITDVKLQDAGVYRCMISYGGADYKRITVKVNAPYNKINQRILVVDPVTSEHELTCQAEGYPKAEVIWTSSDHQVLSGKTTTTNSKREEKLFNVTSTLRINTTTNEIFYCTFRRLDPEENHTAELVIPELPLAHPPNERGGGGSGGGGSGGGGSSLQPLALEGSLQSRGGGGGSGGGGSGGGGSGDTRPRFLEQVKHECHFFNGTERVRFLDRYFYHQEEYVRFDSDVGEYRAVTELGRPDAEYWNSQKDLLEQKRAAVDTYCRHNYGVGESFTVQRRVYPEVTVYPAKTQPLQHHNLLVCSVNGFYPASIEVRWFRNGQEEKTGVVSTGLIQNGDWTFQTLVMLETVPRSGEVYTCQVEHPSLTSPLTVEWRARSESAQSKM

SEQ ID NO: 426 - protein, 464 aa, Artificial Sequence
  Synthetic sequence
SLQPLALEGSLQSRGGGGGSGGGGSGGGGSGDTRPRFLEQVKHECHFFNGTERVRFLDRYFYHQEEYVRFDSDVGEYRAVTELGRPDAEYWNSQKDLLEQKRAAVDTYCRHNYGVGESFTVQRRVYPEVTVYPAKTQPLQHHNLLVCSVNGFYPASIEVRWFRNGQEEKTGVVSTGLIQNGDWTFQTLVMLETVPRSGEVYTCQVEHPSLTSPLTVEWRARSESAQSKMGGGGSGGGGSGGGGSFTVTVPKDLYVVEYGSNMTIECKFPVEKQLDLAALIVYWEMEDKNIIQFVHGEEDLKVQHSSYRQRARLLKDQLSLGNAALQITDVKLQDAGVYRCMISYGGADYKRITVKVNAPYNKINQRILVVDPVTSEHELTCQAEGYPKAEVIWTSSDHQVLSGKTTTTNSKREEKLFNVTSTLRINTTTNEIFYCTFRRLDPEENHTAELVIPELPLAHPPNER

SEQ ID NO: 427 - protein, 526 aa, Artificial Sequence
  Synthetic sequence
IKEEHVIIQAEFYLNPDQSGEFMFDFDGDEIFHVDMAKKETVWRLEEFGRFASFEAQGALANIAVDKANLEIMTKRSNYTPITNVPPEVTVLTNSPVELREPNVLICFIDKFTPPVVNVTWLRNGKPVTTGVSETVFLPREDHLFRKFHYLPFLPSTEDVYDCRVEHWGLDEPLLKHWEFDAPSPLPETGGSAAAGGASTKGPSVFPLAPSSKSTSGGTAALGCLVKDYFPEPVTVSWNSGALTSGVHTFPAVLQSSGLYSLSSVVTVPSSSLGTQTYICNVNHKPSNTKVDKKVEPKSCDKTHTCPPCPAPEAAGGPSVFLFPPKPKDTLMISRTPEVTCVVVDVSHEDPEVKFNWYVDGVEVHNAKTKPREEQYNSTYRVVSVLTVLHQDWLNGKEYKCKVSNKALPAPIEKTISKAKGQPREPQVYTLPPSREEMTKNQVSLTCLVKGFYPSDIAVEWESNGQPENNYKTTPPVLDSDGSFFLYSKLTVDKSRWQQGNVFSCSVMHEALHNHYTQKSLSLSPG

SEQ ID NO: 428 - protein, 355 aa, Artificial Sequence
  Synthetic sequence
SLQPLALEGSLQSRGGGGGSGGGGSGGGGSGDTRPRFLEQVKHECHFFNGTERVRFLDRYFYHQEEYVRFDSDVGEYRAVTELGRPDAEYWNSQKDLLEQKRAAVDTYCRHNYGVGESFTVQRRVYPEVTVYPAKTQPLQHHNLLVCSVNGFYPASIEVRWFRNGQEEKTGVVSTGLIQNGDWTFQTLVMLETVPRSGEVYTCQVEHPSLTSPLTVEWRARSESAQSKMGGGGSGGGGSGGGGSGGGGSTVAAPSVFIFPPSDEQLKSGTASVVCLLNNFYPREAKVQWKVDNALQSGNSQESVTEQDSKDSTYSLSSTLTLSKADYEKHKVYACEVTHQGLSSPVTKSFNRGEC

SEQ ID NO: 429 - protein, 667 aa, Artificial Sequence
  Synthetic sequence
SLQPLALEGSLQSRGGGGGSGGGGSGGGGSIKEEHVIIQAEFYLNPDQSGEFMFDFDGDEIFHVDMAKKETVWRLEEFGRFASFEAQGALANIAVDKANLEIMTKRSNYTPITNVPPEVTVLTNSPVELREPNVLICFIDKFTPPVVNVTWLRNGKPVTTGVSETVFLPREDHLFRKFHYLPFLPSTEDVYDCRVEHWGLDEPLLKHWEFDAPSPLPETGGGGSGGGGSGGGGSGDTRPRFLEQVKHECHFFNGTERVRFLDRYFYHQEEYVRFDSDVGEYRAVTELGRPDAEYWNSQKDLLEQKRAAVDTYCRHNYGVGESFTVQRRVYPEVTVYPAKTQPLQHHNLLVCSVNGFYPASIEVRWFRNGQEEKTGVVSTGLIQNGDWTFQTLVMLETVPRSGEVYTCQVEHPSLTSPLTVEWRARSESAQSKMGGSAAAGGDKTHTCPPCPAPEAAGGPSVFLFPPKPKDTLMISRTPEVTCVVVDVSHEDPEVKFNWYVDGVEVHNAKTKPREEQYNSTYRVVSVLTVLHQDWLNGKEYKCKVSNKALPAPIEKTISKAKGQPREPQVYTLPPSREEMTKNQVSLTCLVKGFYPSDIAVEWESNGQPENNYKTTPPVLDSDGSFFLYSKLTVDKSRWQQGNVFSCSVMHEALHNHYTQKSLSLSPG

SEQ ID NO: 430 - protein, 672 aa, Artificial Sequence
  Synthetic sequence
SLQPLALEGSLQSRGGGGGSGGGGSGGGGSGDTRPRFLEQVKHECHFFNGTERVRFLDRYFYHQEEYVRFDSDVGEYRAVTELGRPDAEYWNSQKDLLEQKRAAVDTYCRHNYGVGESFTVQRRVYPEVTVYPAKTQPLQHHNLLVCSVNGFYPASIEVRWFRNGQEEKTGVVSTGLIQNGDWTFQTLVMLETVPRSGEVYTCQVEHPSLTSPLTVEWRARSESAQSKMGGGGSGGGGSGGGGSGGGGSIKEEHVIIQAEFYLNPDQSGEFMFDFDGDEIFHVDMAKKETVWRLEEFGRFASFEAQGALANIAVDKANLEIMTKRSNYTPITNVPPEVTVLTNSPVELREPNVLICFIDKFTPPVVNVTWLRNGKPVTTGVSETVFLPREDHLFRKFHYLPFLPSTEDVYDCRVEHWGLDEPLLKHWEFDAPSPLPETGGSAAAGGDKTHTCPPCPAPEAAGGPSVFLFPPKPKDTLMISRTPEVTCVVVDVSHEDPEVKFNWYVDGVEVHNAKTKPREEQYNSTYRVVSVLTVLHQDWLNGKEYKCKVSNKALPAPIEKTISKAKGQPREPQVYTLPPSREEMTKNQVSLTCLVKGFYPSDIAVEWESNGQPENNYKTTPPVLDSDGSFFLYSKLTVDKSRWQQGNVFSCSVMHEALHNHYTQKSLSLSPG

SEQ ID NO: 431 - protein, 671 aa, Artificial Sequence
  Synthetic sequence
SLQPLALEGSLQSRGGGGGSGGGGSGGGGSGDTRPRFLEQVKHECHFFNGTERVRFLDRYFYHQEEYVRFDSDVGEYRAVTELGRPDAEYWNSQKDLLEQKRAAVDTYCRHNYGVGESFTVQRGGGGSIKEEHVIIQAEFYLNPDQSGEFMFDFDGDEIFHVDMAKKETVWRLEEFGRFASFEAQGALANIAVDKANLEIMTKRSNYTPITNVPPEVTVLTNSPVELREPNVLICFIDKFTPPVVNVTWLRNGKPVTTGVSETVFLPREDHLFRKFHYLPFLPSTEDVYDCRVEHWGLDEPLLKHWEFDAPSPLPETGGGGSGGGGSGGGGSVYPEVTVYPAKTQPLQHHNLLVCSVNGFYPASIEVRWFRNGQEEKTGVVSTGLIQNGDWTFQTLVMLETVPRSGEVYTCQVEHPSLTSPLTVEWRARSESAQSKMGGSAAAGGDKTHTCPPCPAPEAAGGPSVFLFPPKPKDTLMISRTPEVTCVVVDVSHEDPEVKFNWYVDGVEVHNAKTKPREEQYNSTYRVVSVLTVLHQDWLNGKEYKCKVSNKALPAPIEKTISKAKGQPREPQVYTLPPSREEMTKNQVSLTCLVKGFYPSDIAVEWESNGQPENNYKTTPPVLDSDGSFFLYSKLTVDKSRWQQGNVFSCSVMHEALHNHYTQKSLSLSPG

SEQ ID NO: 432 - protein, 454 aa, Artificial Sequence
  Synthetic sequence
RTRPLWVRMEGGGGSGGGGSGGGGSSERHFVHQFKGECYFTNGTQRIRLVTRYIYNREEYLRFDSDVGEYRAVTELGRHSAEYYNKQYLERTRAELDTACRHNYEETEVPTSLRRLEQPNVAISLSRTEALNHHNTLVCSVTDFYPAKIKVRWFRNGQEETVGVSSTQLIRNGDWTFQVLVMLEMTPHQGEVYTCHVEHPSLKSPITVEWRAQSESARSKGGSAAAGGDKTHTCPPCPAPEAAGGPSVFLFPPKPKDTLMISRTPEVTCVVVDVSHEDPEVKFNWYVDGVEVHNAKTKPREEQYNSTYRVVSVLTVLHQDWLNGKEYKCKVSNKALPAPIEKTISKAKGQPREPQVYTLPPSREEMTKNQVSLTCLVKGFYPSDIAVEWESNGQPENNYKTTPPVLDSDGSFFLYSKLTVDKSRWQQGNVFSCSVMHEALHNHYTQKSLSLSPG

SEQ ID NO: 433 - protein, 110 aa, Artificial Sequence
  Synthetic sequence
MALWMRLLPLLALLALWGPDPAAAFVNQHLCGSHLVEALYLVCGERGFFYTPKTRREAEDLQVGQVELGGGPGAGSLQPLALEGSLQKRGIVEQCCTSICSLYQLENYCN

SEQ ID NO: 434 - protein, 18 aa, Artificial Sequence
  Synthetic sequence
GAGSLQPLALEGSLQKRG

SEQ ID NO: 435 - protein, 15 aa, Artificial Sequence
  Synthetic sequence
SLQPLALEGSLQKRG

SEQ ID NO: 436 - protein, 13 aa, Artificial Sequence
  Synthetic sequence
QPLALEGSLQKRG

SEQ ID NO: 437 - protein, 13 aa, Artificial Sequence
  Synthetic sequence
QPLALEGSLQSRG

SEQ ID NO: 438 - protein, 92 aa, Artificial sequence
  synthetic sequence
DTRPRFLWQHKFECHFFNGTERVRLLERCIYNQEESVRFDSDVGEYRAVTELGRPAAEYWNSQKDLLEQRRAAVDTYCRHNYGVGESFTVQR

SEQ ID NO: 439 - protein, 11 aa, Artificial sequence
  synthetic sequence
QLQPFPQPCLP

SEQ ID NO: 440 - protein, 10 aa, Artificial sequence
  synthetic sequence
RTRPLWVRME

SEQ ID NO: 441 - protein, 20 aa, Artificial sequence
  synthetic sequence
GSSSSGSSSSGSSSSGSSSS

SEQ ID NO: 442 - protein, 25 aa, Artificial sequence
  synthetic sequence
GSSSSGSSSSGSSSSGSSSSGSSSS

SEQ ID NO: 443 - protein, 50 aa, Artificial sequence; identical to SEQ ID NO: 1
  synthetic sequence
  VARIANT (6)..(50): Each copy of Gly Gly Gly Gly Ser at positions 6 to 50 may either be present or absent

SEQ ID NO: 444 - protein, 5 aa, Artificial sequence
  synthetic sequence
GGGGS

SEQ ID NO: 445 - protein, 10 aa, Artificial sequence
  synthetic sequence
GGGGSGGGGS

SEQ ID NO: 446 - protein, 25 aa, Artificial sequence
  synthetic sequence
GGGGSGGGGSGGGGSGGGGSGGGGS

SEQ ID NO: 447 - protein, 30 aa, Artificial sequence
  synthetic sequence
GGGGSGGGGSGGGGSGGGGSGGGGSGGGGS

SEQ ID NO: 448 - protein, 35 aa, Artificial sequence
  synthetic sequence
GGGGSGGGGSGGGGSGGGGSGGGGSGGGGSGGGGS

SEQ ID NO: 449 - protein, 40 aa, Artificial sequence
  synthetic sequence
GGGGSGGGGSGGGGSGGGGSGGGGSGGGGSGGGGSGGGGS

SEQ ID NO: 450 - protein, 45 aa, Artificial sequence
  synthetic sequence
GGGGSGGGGSGGGGSGGGGSGGGGSGGGGSGGGGSGGGGSGGGGS

SEQ ID NO: 451 - protein, 50 aa, Artificial sequence; identical to SEQ ID NO: 1
  synthetic sequence

SEQ ID NO: 452 - protein, 8 aa, Artificial sequence
  synthetic sequence
TPITNVPP

1.-23. (canceled)

24. A multimeric T-cell modulatory antigen-presenting polypeptide comprising:
a) a first polypeptide comprising:
i) a peptide that displays a celiac-associated or a Type 1 Diabetes-associated (T1D-associated) epitope capable of being bound by a T-cell receptor (TCR);
ii) a first major histocompatibility complex (MHC) class II polypeptide; and
b) a second polypeptide comprising:
i) a second MHC Class II polypeptide; and
wherein one or both polypeptides of the multimeric polypeptide comprises one or more immunomodulatory polypeptides,
wherein the first and the second MHC class II polypeptides comprise: i) an MHC class II α chain polypeptide selected from a polypeptide having at least 90% amino acid sequence identity to a DRA*0101 polypeptide, a DQA1*05:01 polypeptide, and a DQA1*03:01 polypeptide; and ii) an MHC class II β chain polypeptide selected from a polypeptide having at least 90% amino acid sequence identity to a DRB1*04:01 polypeptide, a DRB1*03:01 polypeptide, a DRB1*04:02 polypeptide, a DRB1*04:05 polypeptide, a DQB1*02:01 polypeptide, and a DQB1*03:02 polypeptide; and
wherein one or both polypeptides of the multimeric polypeptide optionally comprises an immunoglobulin (Ig) Fc polypeptide or a non-Ig scaffold.

25. The multimeric T-cell modulatory antigen-presenting polypeptide of claim 24, wherein:
a1) the first polypeptide comprises, in order from N-terminus to C-terminus:
i) the peptide epitope;
ii) an MHC Class II β1 polypeptide; and
iii) an MHC Class II β2 polypeptide; and
b1) the second polypeptide comprises, in order from N-terminus to C-terminus:
i) the one or more immunomodulatory polypeptides;
ii) an MHC Class II α1 polypeptide;
iii) an MHC Class II α2 polypeptide; and
iv) an Ig Fc polypeptide; or
a2) the first polypeptide comprises, in order from N-terminus to C-terminus:
i) the peptide epitope;
ii) an MHC Class II β1 polypeptide; and
iii) an MHC Class II β2 polypeptide; and
b2) the second polypeptide comprises, in order from N-terminus to C-terminus:
i) an MHC Class II α1 polypeptide;
ii) an MHC Class II α2 polypeptide;
iii) an Ig Fc polypeptide; and
iv) the one or more immunomodulatory polypeptides; or
a3) the first polypeptide comprises, in order from N-terminus to C-terminus:
i) the peptide epitope;
ii) an MHC Class II β1 polypeptide; and
iii) an MHC Class II β2 polypeptide; and
b3) the second polypeptide comprises, in order from N-terminus to C-terminus:
i) an MHC Class II α1 polypeptide;
ii) an MHC Class II α2 polypeptide;
iii) the one or more immunomodulatory polypeptides; and
iv) an Ig Fc polypeptide; or
a4) the first polypeptide comprises, in order from N-terminus to C-terminus:
i) an MHC Class II α1 polypeptide;
ii) an MHC Class II α2 polypeptide; and
iii) an Ig Fc polypeptide; and
b4) the second polypeptide comprises, in order from N-terminus to C-terminus:
i) the one or more immunomodulatory polypeptides;
ii) the peptide epitope;
iii) an MHC Class II β1 polypeptide; and
iv) an MHC Class II β2 polypeptide; or
a5) the first polypeptide comprises, in order from N-terminus to C-terminus:
i) an MHC Class II α1 polypeptide;
ii) an MHC Class II α2 polypeptide; and
iii) an Ig Fc polypeptide; and
b5) the second polypeptide comprises, in order from N-terminus to C-terminus:
i) the peptide epitope;
ii) an MHC Class II β1 polypeptide;
iii) an MHC Class II β2 polypeptide; and
iv) the one or more immunomodulatory polypeptides.

26. The multimeric T-cell modulatory antigen-presenting polypeptide of claim 24, wherein:
a) the MHC class II α1 polypeptide comprises an amino acid sequence having at least 95% amino acid sequence identity to a DRA1*01:01 polypeptide; and the MHC class II β1 polypeptide comprises an amino acid sequence having at least 95% amino acid sequence identity to a DRB1*04:01 polypeptide; or
b) the MHC class II α1 polypeptide comprises an amino acid sequence having at least 95% amino acid sequence identity to a DQA1*0501 polypeptide; and the MHC class II β1 polypeptide comprises an amino acid sequence having at least 95% amino acid sequence identity to a DQB1*0201 polypeptide; or
c) the MHC class II α1 polypeptide comprises an amino acid sequence having at least 95% amino acid sequence identity to a DQA1*0301 polypeptide; and the MHC class II β1 polypeptide comprises an amino acid sequence having at least 95% amino acid sequence identity to a DQB1*0302 polypeptide.

27. The T-cell modulatory antigen-presenting polypeptide of claim 24, wherein the immunomodulatory polypeptide:
a) comprises the amino acid sequence of a naturally-occurring immunomodulatory polypeptide; or
b) is a variant immunomodulatory polypeptide that comprises an amino acid sequence having from 1 to 10 amino acid substitutions compared to the amino acid sequence of a naturally-occurring immunomodulatory polypeptide, wherein the variant immunomodulatory polypeptide has reduced affinity for a co-immunomodulatory polypeptide, compared to the affinity of the naturally-occurring immunomodulatory polypeptide for the co-immunomodulatory polypeptide.

28. The T-cell modulatory antigen-presenting polypeptide of claim 24, wherein the immunomodulatory polypeptide is a PD-L1 polypeptide, a FasL polypeptide, or a TGF-β polypeptide.

29. The T-cell modulatory antigen-presenting polypeptide of claim 24, wherein the immunomodulatory polypeptide is a PD-L1 polypeptide.

30. The T-cell modulatory antigen-presenting polypeptide of claim 24, wherein the T1D-associated peptide or celiac disease-associated peptide has a length of from about 4 amino acids to about 25 amino acids.

31. The T-cell modulatory antigen-presenting polypeptide of claim 30, wherein the peptide is a T1D-associated peptide comprising the amino acid sequence SLQPLALEGSLQSRG (SEQ ID NO:78).

32. The T-cell modulatory antigen-presenting polypeptide of claim 30, wherein the peptide is a celiac disease-associated peptide.

33. The T-cell modulatory antigen-presenting polypeptide of claim 24, wherein
a) the first polypeptide comprises from N-terminus to C-terminus:
i) a T1D-associated peptide comprising the amino acid sequence SLQPLALEGSLQSRG (SEQ ID NO:78);
ii) a linker; and
iii) an MHC class II beta-chain polypeptide, and
b) the second polypeptide comprises from N-terminus to C-terminus:
i) a PD-L1 immunomodulatory polypeptide;
ii) a linker;
iii) an MHC class II alpha-chain polypeptide;
iv) a linker; and
v) an Ig Fc polypeptide comprising an amino acid sequence having at least 90% amino acid sequence identity to the IgG1 Fc amino acid sequence depicted in FIG. 21A.

34. The T-cell modulatory antigen-presenting polypeptide of claim 33, wherein the Ig Fc polypeptide comprises an Ala at position 14 and an Ala at position 15, based on the amino acid number of FIG. 21A.

35. The T-cell modulatory antigen-presenting polypeptide of claim 33, wherein
the MHC class II beta-chain polypeptide comprises an amino acid sequence having at least 90% amino acid sequence identity to the DRB1*0401 amino acid sequence set forth in SEQ ID NO:58, and
the MHC class II alpha-chain polypeptide comprises at least 90% amino acid sequence identity to the DRA1*0101 amino acid sequence set forth in SEQ ID NO:57.

36. The T-cell modulatory antigen-presenting polypeptide of claim 24, wherein:
i) the first polypeptide comprises the amino acid sequence of the 2639 polypeptide depicted in FIG. 40B, and
ii) the second polypeptide comprises the amino acid sequence of the 3003 polypeptide depicted in FIG. 40C; or
i) the first polypeptide comprises the amino acid sequence of the 2639 polypeptide depicted in FIG. 40B, and
ii) the second polypeptide comprises the amino acid sequence of the 3004 polypeptide depicted in FIG. 40D; or
i) the first polypeptide comprises the amino acid sequence of the 2639 polypeptide depicted in FIG. 40B, and
ii) the second polypeptide comprises the amino acid sequence of the 3005 polypeptide depicted in FIG. 40E; or
i) the first polypeptide comprises the amino acid sequence of the 3213 polypeptide depicted in FIG. 40F, and
ii) the second polypeptide comprises the amino acid sequence of the 2932 polypeptide depicted in FIG. 40A; or
i) the first polypeptide comprises the amino acid sequence of the 3214 polypeptide depicted in FIG. 40G, and
ii) the second polypeptide comprises the amino acid sequence of the 2932 polypeptide depicted in FIG. 40A.

37. A pharmaceutical composition comprising the T-cell modulatory antigen-presenting polypeptide of claim 24.

38. A pharmaceutical composition comprising the T-cell modulatory antigen-presenting polypeptide of claim 35.

39. One or more nucleic acids comprising nucleotide sequences encoding the T-cell modulatory antigen-presenting polypeptide of claim 24.

40. An expression vector or host cell comprising the one or more nucleic acids of claim 39.

41. A method of reducing the number and/or activity of CD4⁺ and/or CD8⁺ self-reactive T cells specific for a type 1 diabetes-associated epitope or a celiac disease-associated epitope in an individual, the method comprising contacting the CD4⁺ T cells with the T-cell modulatory antigen-presenting polypeptide of claim 24, wherein said contacting reduces the number and/or activity of the CD4⁺ and/or CD8+ T cells.

42. A method of treating type 1 diabetes (T1D) or celiac disease in an individual, the method comprising administering to an individual in need thereof an effective amount of the T-cell modulatory antigen-presenting polypeptide of claim 24, wherein said administering treats the type 1 diabetes or celiac disease in the individual.

43. A method of treating type 1 diabetes (T1D) in an individual, the method comprising administering to an individual in need thereof an effective amount of the T-cell modulatory antigen-presenting polypeptide of claim 35.
